United States Patent Application Publication US 2024/0100185 A1 - sequence listing, part 2

SEQ ID NO: 23989 - RNA, 20 nt, Artificial Sequence
  spacer sequence CTCN PAM
aagaacuuccagaacauauu

SEQ ID NO: 23990 - RNA, 20 nt, Artificial Sequence
  spacer sequence CTCN PAM
gccacgcugcaccucuccaa

SEQ ID NO: 23991 - RNA, 20 nt, Artificial Sequence
  spacer sequence CTCN PAM
ccaacaucccgugagugcug

SEQ ID NO: 23992 - RNA, 20 nt, Artificial Sequence
  spacer sequence CTCN PAM
aacaucccgugagugcuggg

SEQ ID NO: 23993 - RNA, 20 nt, Artificial Sequence
  spacer sequence CTCN PAM
cgggauguuggagaggugca

SEQ ID NO: 23994 - RNA, 20 nt, Artificial Sequence
  spacer sequence CTCN PAM
uggggccgggggcgggcaag

SEQ ID NO: 23995 - RNA, 20 nt, Artificial Sequence
  spacer sequence CTCN PAM
gcuuggcuguccuaccgcgu

SEQ ID NO: 23996 - RNA, 20 nt, Artificial Sequence
  spacer sequence CTCN PAM
ggaaacgccagaaguccaca

SEQ ID NO: 23997 - RNA, 20 nt, Artificial Sequence
  spacer sequence CTCN PAM
uaccccaaaccugaaguacu

SEQ ID NO: 23998 - RNA, 20 nt, Artificial Sequence
  spacer sequence CTCN PAM
aggccuugcaguacuucagg

SEQ ID NO: 23999 - RNA, 20 nt, Artificial Sequence
  spacer sequence CTCN PAM
agcuccaggccuugcaguac

SEQ ID NO: 24000 - RNA, 20 nt, Artificial Sequence
  spacer sequence CTCN PAM
gcucaagcuccaggccuugc

SEQ ID NO: 24001 - RNA, 20 nt, Artificial Sequence
  spacer sequence CTCN PAM
agggagggggucguuggaca

SEQ ID NO: 24002 - RNA, 20 nt, Artificial Sequence
  spacer sequence CTCN PAM
cuugagcagcccucggcuca

SEQ ID NO: 24003 - RNA, 20 nt, Artificial Sequence
  spacer sequence CTCN PAM
aaaguguccaacgacccccu

SEQ ID NO: 24004 - RNA, 20 nt, Artificial Sequence
  spacer sequence CTCN PAM
ggggaugcucccugugagaa

SEQ ID NO: 24005 - RNA, 20 nt, Artificial Sequence
  spacer sequence CTCN PAM
cugugagaauguauaaugca

SEQ ID NO: 24006 - RNA, 20 nt, Artificial Sequence
  spacer sequence CTCN PAM
cagggagcauccccugagcc

SEQ ID NO: 24007 - RNA, 20 nt, Artificial Sequence
  spacer sequence CTCN PAM
aaaaauauaaauaaauaaau

SEQ ID NO: 24008 - RNA, 20 nt, Artificial Sequence
  spacer sequence CTCN PAM
agccugggugacaaagcaag

SEQ ID NO: 24009 - RNA, 20 nt, Artificial Sequence
  spacer sequence CTCN PAM
guucacugcaaccuccgccu

SEQ ID NO: 24010 - RNA, 20 nt, Artificial Sequence
  spacer sequence CTCN PAM
gccucuuggguucaagugau

SEQ ID NO: 24011 - RNA, 20 nt, Artificial Sequence
  spacer sequence CTCN PAM
uggguucaagugauugugcc

SEQ ID NO: 24012 - RNA, 20 nt, Artificial Sequence
  spacer sequence CTCN PAM
gcuucccgaguagcugggac

SEQ ID NO: 24013 - RNA, 20 nt, Artificial Sequence
  spacer sequence CTCN PAM
ggaagcugagguggcacaau

SEQ ID NO: 24014 - RNA, 20 nt, Artificial Sequence
  spacer sequence CTCN PAM
acuaaaaauacaaaaauuag

SEQ ID NO: 24015 - RNA, 20 nt, Artificial Sequence
  spacer sequence CTCN PAM
ugaccuugugauccgccugc

SEQ ID NO: 24016 - RNA, 20 nt, Artificial Sequence
  spacer sequence CTCN PAM
caaagugcugggauacaggc

SEQ ID NO: 24017 - RNA, 20 nt, Artificial Sequence
  spacer sequence CTCN PAM
cgccuguaucccagcacuuu

SEQ ID NO: 24018 - RNA, 20 nt, Artificial Sequence
  spacer sequence CTCN PAM
aaauaaguaaaauaaauaaa

SEQ ID NO: 24019 - RNA, 20 nt, Artificial Sequence
  spacer sequence CTCN PAM
aucucaaaauaaguaaaaua

SEQ ID NO: 24020 - RNA, 20 nt, Artificial Sequence
  spacer sequence CTCN PAM
gucgcccaggcuggagugca

SEQ ID NO: 24021 - RNA, 20 nt, Artificial Sequence
  spacer sequence CTCN PAM
agccugggcgacagagcgug

SEQ ID NO: 24022 - RNA, 20 nt, Artificial Sequence
  spacer sequence CTCN PAM
gcaaguucugccuccugggu

SEQ ID NO: 24023 - RNA, 20 nt, Artificial Sequence
  spacer sequence CTCN PAM
uggguucaugccacucugcu

SEQ ID NO: 24024 - RNA, 20 nt, Artificial Sequence
  spacer sequence CTCN PAM
gcugccucagccucccgagu

SEQ ID NO: 24025 - RNA, 20 nt, Artificial Sequence
  spacer sequence CTCN PAM
gccucccgaguagcugggag

SEQ ID NO: 24026 - RNA, 20 nt, Artificial Sequence
  spacer sequence CTCN PAM
cgaguagcugggagggacua

SEQ ID NO: 24027 - RNA, 20 nt, Artificial Sequence
  spacer sequence CTCN PAM
ggaggcugaggcagcagagu

SEQ ID NO: 24028 - RNA, 20 nt, Artificial Sequence
  spacer sequence CTCN PAM
cagcuacucgggaggcugag

SEQ ID NO: 24029 - RNA, 20 nt, Artificial Sequence
  spacer sequence CTCN PAM
ugacuuugugaucaacccgc

SEQ ID NO: 24030 - RNA, 20 nt, Artificial Sequence
  spacer sequence CTCN PAM
gccucccaaagugcugggau

SEQ ID NO: 24031 - RNA, 20 nt, Artificial Sequence
  spacer sequence CTCN PAM
caaagugcugggauaacagg

SEQ ID NO: 24032 - RNA, 20 nt, Artificial Sequence
  spacer sequence CTCN PAM
caccuguuaucccagcacuu

SEQ ID NO: 24033 - RNA, 20 nt, Artificial Sequence
  spacer sequence CTCN PAM
uggguucaagcaauccccug

SEQ ID NO: 24034 - RNA, 20 nt, Artificial Sequence
  spacer sequence CTCN PAM
ggcuggucuuaacucuuggg

SEQ ID NO: 24035 - RNA, 20 nt, Artificial Sequence
  spacer sequence CTCN PAM
cuuuauugcucaggcugguc

SEQ ID NO: 24036 - RNA, 20 nt, Artificial Sequence
  spacer sequence CTCN PAM
gucucuacaggaacaauugg

SEQ ID NO: 24037 - RNA, 20 nt, Artificial Sequence
  spacer sequence CTCN PAM
acaggaacaauugguuaaaa

SEQ ID NO: 24038 - RNA, 20 nt, Artificial Sequence
  spacer sequence CTCN PAM
uagcuaauuuuaaccaauug

SEQ ID NO: 24039 - RNA, 20 nt, Artificial Sequence
  spacer sequence CTCN PAM
uccggauugggagguugagg

SEQ ID NO: 24040 - RNA, 20 nt, Artificial Sequence
  spacer sequence CTCN PAM
caauccggaagagcugggac

SEQ ID NO: 24041 - RNA, 20 nt, Artificial Sequence
  spacer sequence CTCN PAM
accucccaauccggaagagc

SEQ ID NO: 24042 - RNA, 20 nt, Artificial Sequence
  spacer sequence CTCN PAM
caccucaaccucccaauccg

SEQ ID NO: 24043 - RNA, 20 nt, Artificial Sequence
  spacer sequence CTCN PAM
ggagguugagguugcaguga

SEQ ID NO: 24044 - RNA, 20 nt, Artificial Sequence
  spacer sequence CTCN PAM
ugagcgcgaagugaaccucc

SEQ ID NO: 24045 - RNA, 20 nt, Artificial Sequence
  spacer sequence CTCN PAM
accuccugagcgcgaaguga

SEQ ID NO: 24046 - RNA, 20 nt, Artificial Sequence
  spacer sequence CTCN PAM
cugcaaccucaaccuccuga

SEQ ID NO: 24047 - RNA, 20 nt, Artificial Sequence
  spacer sequence CTCN PAM
aggcugggcggcagaguaag

SEQ ID NO: 24048 - RNA, 20 nt, Artificial Sequence
  spacer sequence CTCN PAM
gccgcccagccuggagucug

SEQ ID NO: 24049 - RNA, 20 nt, Artificial Sequence
  spacer sequence CTCN PAM
gccaggccccuuguugauuu

SEQ ID NO: 24050 - RNA, 20 nt, Artificial Sequence
  spacer sequence CTCN PAM
cgccuaucaucccagcacuu

SEQ ID NO: 24051 - RNA, 20 nt, Artificial Sequence
  spacer sequence CTCN PAM
uaaagugcugggaugauagg

SEQ ID NO: 24052 - RNA, 20 nt, Artificial Sequence
  spacer sequence CTCN PAM
gccuccuaaagugcugggau

SEQ ID NO: 24053 - RNA, 20 nt, Artificial Sequence
  spacer sequence CTCN PAM
ggugaucugccugccucggc

SEQ ID NO: 24054 - RNA, 20 nt, Artificial Sequence
  spacer sequence CTCN PAM
ugaccucaggugaucugccu

SEQ ID NO: 24055 - RNA, 20 nt, Artificial Sequence
  spacer sequence CTCN PAM
acuaaaaauaaaaaaauuag

SEQ ID NO: 24056 - RNA, 20 nt, Artificial Sequence
  spacer sequence CTCN PAM
caaguagcugggauuacagg

SEQ ID NO: 24057 - RNA, 20 nt, Artificial Sequence
  spacer sequence CTCN PAM
gucucccaaguagcugggau

SEQ ID NO: 24058 - RNA, 20 nt, Artificial Sequence
  spacer sequence CTCN PAM
ugccucagucucccaaguag

SEQ ID NO: 24059 - RNA, 20 nt, Artificial Sequence
  spacer sequence CTCN PAM
gccugcagguucaagugauu

SEQ ID NO: 24060 - RNA, 20 nt, Artificial Sequence
  spacer sequence CTCN PAM
ccacaaccuccgccugcagg

SEQ ID NO: 24061 - RNA, 20 nt, Artificial Sequence
  spacer sequence CTCN PAM
gcucaccacaaccuccgccu

SEQ ID NO: 24062 - RNA, 20 nt, Artificial Sequence
  spacer sequence CTCN PAM
cgccugggcgacagagcaag

SEQ ID NO: 24063 - RNA, 20 nt, Artificial Sequence
  spacer sequence CTCN PAM
gucgcccaggcgggagcaca

SEQ ID NO: 24064 - RNA, 20 nt, Artificial Sequence
  spacer sequence CTCN PAM
acuuuuuuuuuuccagaugg

SEQ ID NO: 24065 - RNA, 20 nt, Artificial Sequence
  spacer sequence CTCN PAM
uccacuuuuuuuuuuccaga

SEQ ID NO: 24066 - RNA, 20 nt, Artificial Sequence
  spacer sequence CTCN PAM
guuucugcaaacuuguagau

SEQ ID NO: 24067 - RNA, 20 nt, Artificial Sequence
  spacer sequence CTCN PAM
uaaaaggcccuacgccuucc

SEQ ID NO: 24068 - RNA, 20 nt, Artificial Sequence
  spacer sequence CTCN PAM
gaaaacuagucuggggaaag

SEQ ID NO: 24069 - RNA, 20 nt, Artificial Sequence
  spacer sequence CTCN PAM
cggaccugacugggcgcccc

SEQ ID NO: 24070 - RNA, 20 nt, Artificial Sequence
  spacer sequence CTCN PAM
cgccuuucuccucccacagg

SEQ ID NO: 24071 - RNA, 20 nt, Artificial Sequence
  spacer sequence CTCN PAM
ucccacaggcccucagucuc

SEQ ID NO: 24072 - RNA, 20 nt, Artificial Sequence
  spacer sequence CTCN PAM
cacaggcccucagucuccga

SEQ ID NO: 24073 - RNA, 20 nt, Artificial Sequence
  spacer sequence CTCN PAM
gucuccgaggaggaucucaa

SEQ ID NO: 24074 - RNA, 20 nt, Artificial Sequence
  spacer sequence CTCN PAM
gaggaggaucucaagguccu

SEQ ID NO: 24075 - RNA, 20 nt, Artificial Sequence
  spacer sequence CTCN PAM
gagacugagggccuguggga

SEQ ID NO: 24076 - RNA, 20 nt, Artificial Sequence
  spacer sequence CTCN PAM
ucggagacugagggccugug

SEQ ID NO: 24077 - RNA, 20 nt, Artificial Sequence
  spacer sequence CTCN PAM
agguccuguuuuccagcaau

SEQ ID NO: 24078 - RNA, 20 nt, Artificial Sequence
  spacer sequence CTCN PAM
cuggaagaacuugaauccuu

SEQ ID NO: 24079 - RNA, 20 nt, Artificial Sequence
  spacer sequence CTCN PAM
uacucacuggaagaacuuga

SEQ ID NO: 24080 - RNA, 20 nt, Artificial Sequence
  spacer sequence CTCN PAM
ccccaggcugcccugcggcc

SEQ ID NO: 24081 - RNA, 20 nt, Artificial Sequence
  spacer sequence CTCN PAM
ccaggcugcccugcggccgg

SEQ ID NO: 24082 - RNA, 20 nt, Artificial Sequence
  spacer sequence CTCN PAM
guggaggaggcgguccaggc

SEQ ID NO: 24083 - RNA, 20 nt, Artificial Sequence
  spacer sequence CTCN PAM
acggagcccaucuggaucag

SEQ ID NO: 24084 - RNA, 20 nt, Artificial Sequence
  spacer sequence CTCN PAM
uccacggagcccaucuggau

SEQ ID NO: 24085 - RNA, 20 nt, Artificial Sequence
  spacer sequence CTCN PAM
uugaccugcacaaccacgac

SEQ ID NO: 24086 - RNA, 20 nt, Artificial Sequence
  spacer sequence CTCN PAM
gggagaaccaccaccugcgg

SEQ ID NO: 24087 - RNA, 20 nt, Artificial Sequence
  spacer sequence CTCN PAM
ccgaggucgugguugugcag

SEQ ID NO: 24088 - RNA, 20 nt, Artificial Sequence
  spacer sequence CTCN PAM
uucuccaaguccaccaucua

SEQ ID NO: 24089 - RNA, 20 nt, Artificial Sequence
  spacer sequence CTCN PAM
aaguccaccaucuaggggca

SEQ ID NO: 24090 - RNA, 20 nt, Artificial Sequence
  spacer sequence CTCN PAM
ggaaugauggaaguugucgc

SEQ ID NO: 24091 - RNA, 20 nt, Artificial Sequence
  spacer sequence CTCN PAM
ggucugcuaaggucacuuca

SEQ ID NO: 24092 - RNA, 20 nt, Artificial Sequence
  spacer sequence CTCN PAM
uuaaaaaaauaaaaucucug

SEQ ID NO: 24093 - RNA, 20 nt, Artificial Sequence
  spacer sequence CTCN PAM
cccugcggugacagggacag

SEQ ID NO: 24094 - RNA, 20 nt, Artificial Sequence
  spacer sequence CTCN PAM
ggcucuuggugacuguggca

SEQ ID NO: 24095 - RNA, 20 nt, Artificial Sequence
  spacer sequence CTCN PAM
uggugacuguggcagcggga

SEQ ID NO: 24096 - RNA, 20 nt, Artificial Sequence
  spacer sequence CTCN PAM
cgcugccacagucaccaaga

SEQ ID NO: 24097 - RNA, 20 nt, Artificial Sequence
  spacer sequence CTCN PAM
acacccggggccagacccuc

SEQ ID NO: 24098 - RNA, 20 nt, Artificial Sequence
  spacer sequence CTCN PAM
gggccaugccuugguggggc

SEQ ID NO: 24099 - RNA, 20 nt, Artificial Sequence
  spacer sequence CTCN PAM
ggugugacccccccaccccu

SEQ ID NO: 24100 - RNA, 20 nt, Artificial Sequence
  spacer sequence CTCN PAM
cuggugugacccccccaccc

SEQ ID NO: 24101 - RNA, 20 nt, Artificial Sequence
  spacer sequence CTCN PAM
cucuggugugacccccccac

SEQ ID NO: 24102 - RNA, 20 nt, Artificial Sequence
  spacer sequence CTCN PAM
ugcaggaucaugcagcuggg

SEQ ID NO: 24103 - RNA, 20 nt, Artificial Sequence
  spacer sequence CTCN PAM
aaucaagucacgugauucuc

SEQ ID NO: 24104 - RNA, 20 nt, Artificial Sequence
  spacer sequence CTCN PAM
cuucaccccgcccccagggc

SEQ ID NO: 24105 - RNA, 20 nt, Artificial Sequence
  spacer sequence CTCN PAM
ccgcugcuccagcugcggag

SEQ ID NO: 24106 - RNA, 20 nt, Artificial Sequence
  spacer sequence CTCN PAM
agcugcggagcuggucgaca

SEQ ID NO: 24107 - RNA, 20 nt, Artificial Sequence
  spacer sequence CTCN PAM
gcagcuggagcagcggggag

SEQ ID NO: 24108 - RNA, 20 nt, Artificial Sequence
  spacer sequence CTCN PAM
guauuauauacuuugcaguu

SEQ ID NO: 24109 - RNA, 20 nt, Artificial Sequence
  spacer sequence CTCN PAM
uaccauuguaucaucuugcu

SEQ ID NO: 24110 - RNA, 20 nt, Artificial Sequence
  spacer sequence CTCN PAM
ggaaacuggguccugccugu

SEQ ID NO: 24111 - RNA, 20 nt, Artificial Sequence
  spacer sequence CTCN PAM
cuggaaacuggguccugccu

SEQ ID NO: 24112 - RNA, 20 nt, Artificial Sequence
  spacer sequence CTCN PAM
cugugccugacccacugggc

SEQ ID NO: 24113 - RNA, 20 nt, Artificial Sequence
  spacer sequence CTCN PAM
aagauaggaccggggcuccc

SEQ ID NO: 24114 - RNA, 20 nt, Artificial Sequence
  spacer sequence CTCN PAM
ggggcucuaagauaggaccg

SEQ ID NO: 24115 - RNA, 20 nt, Artificial Sequence
  spacer sequence CTCN PAM
ggcaucgccuccgguugccu

SEQ ID NO: 24116 - RNA, 20 nt, Artificial Sequence
  spacer sequence CTCN PAM
gguugccuuacaccacgccu

SEQ ID NO: 24117 - RNA, 20 nt, Artificial Sequence
  spacer sequence CTCN PAM
caaacuucaggguuuuuucu

SEQ ID NO: 24118 - RNA, 20 nt, Artificial Sequence
  spacer sequence CTCN PAM
aacuucaggguuuuuucuuc

SEQ ID NO: 24119 - RNA, 20 nt, Artificial Sequence
  spacer sequence CTCN PAM
uuucuguguuuugccugccu

SEQ ID NO: 24120 - RNA, 20 nt, Artificial Sequence
  spacer sequence CTCN PAM
gaugcugggacccggaaggc

SEQ ID NO: 24121 - RNA, 20 nt, Artificial Sequence
  spacer sequence CTCN PAM
uccugucuucucugugcucu

SEQ ID NO: 24122 - RNA, 20 nt, Artificial Sequence
  spacer sequence CTCN PAM
ugucuucucugugcucuuuc

SEQ ID NO: 24123 - RNA, 20 nt, Artificial Sequence
  spacer sequence CTCN PAM
gugcucuuucuaccgccccc

SEQ ID NO: 24124 - RNA, 20 nt, Artificial Sequence
  spacer sequence CTCN PAM
uucuaccgcccccgcguccu

SEQ ID NO: 24125 - RNA, 20 nt, Artificial Sequence
  spacer sequence CTCN PAM
ccuaggauccccuuuccgua

SEQ ID NO: 24126 - RNA, 20 nt, Artificial Sequence
  spacer sequence CTCN PAM
uaggauccccuuuccguaaa

SEQ ID NO: 24127 - RNA, 20 nt, Artificial Sequence
  spacer sequence CTCN PAM
caacagguauaaaaaauuau

SEQ ID NO: 24128 - RNA, 20 nt, Artificial Sequence
  spacer sequence CTCN PAM
ggucucacaacagguauaaa

SEQ ID NO: 24129 - RNA, 20 nt, Artificial Sequence
  spacer sequence CTCN PAM
guauugugaccgcggagcca

SEQ ID NO: 24130 - RNA, 20 nt, Artificial Sequence
  spacer sequence CTCN PAM
gcggucacaauacugagccu

SEQ ID NO: 24131 - RNA, 20 nt, Artificial Sequence
  spacer sequence CTCN PAM
gcgucacaagccaucgggua

SEQ ID NO: 24132 - RNA, 20 nt, Artificial Sequence
  spacer sequence CTCN PAM
ccgcgucacaagccaucggg

SEQ ID NO: 24133 - RNA, 20 nt, Artificial Sequence
  spacer sequence CTCN PAM
aacgguuuuaaucgguucuc

SEQ ID NO: 24134 - RNA, 20 nt, Artificial Sequence
  spacer sequence CTCN PAM
ucccuugucuagcccugugu

SEQ ID NO: 24135 - RNA, 20 nt, Artificial Sequence
  spacer sequence CTCN PAM
cuugucuagcccuguguucg

SEQ ID NO: 24136 - RNA, 20 nt, Artificial Sequence
  spacer sequence CTCN PAM
acagcguccacagcgaacac

SEQ ID NO: 24137 - RNA, 20 nt, Artificial Sequence
  spacer sequence CTCN PAM
cuccguuccgccuucguugc

SEQ ID NO: 24138 - RNA, 20 nt, Artificial Sequence
  spacer sequence CTCN PAM
guuccgccuucguugcuggc

SEQ ID NO: 24139 - RNA, 20 nt, Artificial Sequence
  spacer sequence CTCN PAM
uucugugccgcgggcggccc

SEQ ID NO: 24140 - RNA, 20 nt, Artificial Sequence
  spacer sequence CTCN PAM
gccuccgccuccgccucgcg

SEQ ID NO: 24141 - RNA, 20 nt, Artificial Sequence
  spacer sequence CTCN PAM
gccuccgccucgcgcuccgc

SEQ ID NO: 24142 - RNA, 20 nt, Artificial Sequence
  spacer sequence CTCN PAM
gccucgcgcuccgccagccc

SEQ ID NO: 24143 - RNA, 20 nt, Artificial Sequence
  spacer sequence CTCN PAM
cgcuccgccagccccaggcc

SEQ ID NO: 24144 - RNA, 20 nt, Artificial Sequence
  spacer sequence CTCN PAM
gccagccccaggccgcccgc

SEQ ID NO: 24145 - RNA, 20 nt, Artificial Sequence
  spacer sequence CTCN PAM
cggcugcccgggcccagcgc

SEQ ID NO: 24146 - RNA, 20 nt, Artificial Sequence
  spacer sequence CTCN PAM
cccguggccagguugacggu

SEQ ID NO: 24147 - RNA, 20 nt, Artificial Sequence
  spacer sequence CTCN PAM
uccugguccacgucgcugac

SEQ ID NO: 24148 - RNA, 20 nt, Artificial Sequence
  spacer sequence CTCN PAM
ugguccacgucgcugaccga

SEQ ID NO: 24149 - RNA, 20 nt, Artificial Sequence
  spacer sequence CTCN PAM
ucggucagcgacguggacca

SEQ ID NO: 24150 - RNA, 20 nt, Artificial Sequence
  spacer sequence CTCN PAM
uagccgccgucggccuccgc

SEQ ID NO: 24151 - RNA, 20 nt, Artificial Sequence
  spacer sequence CTCN PAM
gccuuggccccgccgcccgc

SEQ ID NO: 24152 - RNA, 20 nt, Artificial Sequence
  spacer sequence CTCN PAM
cagggcgcgccgccggccga

SEQ ID NO: 24153 - RNA, 20 nt, Artificial Sequence
  spacer sequence CTCN PAM
gccagcaucgugaccaucga

SEQ ID NO: 24154 - RNA, 20 nt, Artificial Sequence
  spacer sequence CTCN PAM
caguaccggucgccgucgga

SEQ ID NO: 24155 - RNA, 20 nt, Artificial Sequence
  spacer sequence CTCN PAM
ucgcaguaccggucgccguc

SEQ ID NO: 24156 - RNA, 20 nt, Artificial Sequence
  spacer sequence CTCN PAM
gacuccucgcaguaccgguc

SEQ ID NO: 24157 - RNA, 20 nt, Artificial Sequence
  spacer sequence CTCN PAM
gccgccuuggggcccggcgc

SEQ ID NO: 24158 - RNA, 20 nt, Artificial Sequence
  spacer sequence CTCN PAM
gggcgcgccgggccccaagg

SEQ ID NO: 24159 - RNA, 20 nt, Artificial Sequence
  spacer sequence CTCN PAM
gcggcugcugcaggucaucg

SEQ ID NO: 24160 - RNA, 20 nt, Artificial Sequence
  spacer sequence CTCN PAM
ucucggccaucaugagccac

SEQ ID NO: 24161 - RNA, 20 nt, Artificial Sequence
  spacer sequence CTCN PAM
gccaucaugagccacuuggc

SEQ ID NO: 24162 - RNA, 20 nt, Artificial Sequence
  spacer sequence CTCN PAM
ugauggccgagaagagcggg

SEQ ID NO: 24163 - RNA, 20 nt, Artificial Sequence
  spacer sequence CTCN PAM
uccgggaugugcaccagcgg

SEQ ID NO: 24164 - RNA, 20 nt, Artificial Sequence
  spacer sequence CTCN PAM
gggaugugcaccagcggcgg

SEQ ID NO: 24165 - RNA, 20 nt, Artificial Sequence
  spacer sequence CTCN PAM
caccgcgcgcggggccgccg

SEQ ID NO: 24166 - RNA, 20 nt, Artificial Sequence
  spacer sequence CTCN PAM
ggucauccucccaccgcgcg

SEQ ID NO: 24167 - RNA, 20 nt, Artificial Sequence
  spacer sequence CTCN PAM
accccaccgugcaggcgcgg

SEQ ID NO: 24168 - RNA, 20 nt, Artificial Sequence
  spacer sequence CTCN PAM
cucuaccccaccgugcaggc

SEQ ID NO: 24169 - RNA, 20 nt, Artificial Sequence
  spacer sequence CTCN PAM
uccuccuccucuuccuccuc

SEQ ID NO: 24170 - RNA, 20 nt, Artificial Sequence
  spacer sequence CTCN PAM
uccucuuccuccuccuccuc

SEQ ID NO: 24171 - RNA, 20 nt, Artificial Sequence
  spacer sequence CTCN PAM
ucuuccuccuccuccucuuc

SEQ ID NO: 24172 - RNA, 20 nt, Artificial Sequence
  spacer sequence CTCN PAM
uccuccuccuccucuuccuc

SEQ ID NO: 24173 - RNA, 20 nt, Artificial Sequence
  spacer sequence CTCN PAM
uccuccucuuccucuucguc

SEQ ID NO: 24174 - RNA, 20 nt, Artificial Sequence
  spacer sequence CTCN PAM
uccucuuccucuucguccuc

SEQ ID NO: 24175 - RNA, 20 nt, Artificial Sequence
  spacer sequence CTCN PAM
ucuuccucuucguccuccuc

SEQ ID NO: 24176 - RNA, 20 nt, Artificial Sequence
  spacer sequence CTCN PAM
uccucuucguccuccuccuc

SEQ ID NO: 24177 - RNA, 20 nt, Artificial Sequence
  spacer sequence CTCN PAM
ucguccuccuccucuuccuc

SEQ ID NO: 24178 - RNA, 20 nt, Artificial Sequence
  spacer sequence CTCN PAM
uccucuuccuccuccuccgc

SEQ ID NO: 24179 - RNA, 20 nt, Artificial Sequence
  spacer sequence CTCN PAM
ucuuccuccuccuccgccau

SEQ ID NO: 24180 - RNA, 20 nt, Artificial Sequence
  spacer sequence CTCN PAM
uccuccuccuccgccauggg

SEQ ID NO: 24181 - RNA, 20 nt, Artificial Sequence
  spacer sequence CTCN PAM
uccuccgccauggguucggc

SEQ ID NO: 24182 - RNA, 20 nt, Artificial Sequence
  spacer sequence CTCN PAM
uccgccauggguucggcggg

SEQ ID NO: 24183 - RNA, 20 nt, Artificial Sequence
  spacer sequence CTCN PAM
gccauggguucggcgggcgc

SEQ ID NO: 24184 - RNA, 20 nt, Artificial Sequence
  spacer sequence CTCN PAM
aggcucuucugcuuccacuc

SEQ ID NO: 24185 - RNA, 20 nt, Artificial Sequence
  spacer sequence CTCN PAM
ucugcuuccacucgcugaug

SEQ ID NO: 24186 - RNA, 20 nt, Artificial Sequence
  spacer sequence CTCN PAM
cugaugagcugcuuggagcg

SEQ ID NO: 24187 - RNA, 20 nt, Artificial Sequence
  spacer sequence CTCN PAM
ucagcgaguggaagcagaag

SEQ ID NO: 24188 - RNA, 20 nt, Artificial Sequence
  spacer sequence CTCN PAM
aagcagcucaucagcgagug

SEQ ID NO: 24189 - RNA, 20 nt, Artificial Sequence
  spacer sequence CTCN PAM
cgcuccaagcagcucaucag

SEQ ID NO: 24190 - RNA, 20 nt, Artificial Sequence
  spacer sequence CTCN PAM
cuggacgaccccgcgcgccg

SEQ ID NO: 24191 - RNA, 20 nt, Artificial Sequence
  spacer sequence CTCN PAM
uuggccauggggcugcgcgg

SEQ ID NO: 24192 - RNA, 20 nt, Artificial Sequence
  spacer sequence CTCN PAM
cugggcagccugaagcgcgc

SEQ ID NO: 24193 - RNA, 20 nt, Artificial Sequence
  spacer sequence CTCN PAM
cgggccacgggccggggcgc

SEQ ID NO: 24194 - RNA, 20 nt, Artificial Sequence
  spacer sequence CTCN PAM
agccgcccugggggccccag

SEQ ID NO: 24195 - RNA, 20 nt, Artificial Sequence
  spacer sequence CTCN PAM
ucggugcucaccgacuuauu

SEQ ID NO: 24196 - RNA, 20 nt, Artificial Sequence
  spacer sequence CTCN PAM
ccgacuuauucugcugauaa

SEQ ID NO: 24197 - RNA, 20 nt, Artificial Sequence
  spacer sequence CTCN PAM
guuuaucagcagaauaaguc

SEQ ID NO: 24198 - RNA, 20 nt, Artificial Sequence
  spacer sequence CTCN PAM
gcagguggggccuggaaguu

SEQ ID NO: 24199 - RNA, 20 nt, Artificial Sequence
  spacer sequence CTCN PAM
ccgacaggccugccacgcgg

SEQ ID NO: 24200 - RNA, 20 nt, Artificial Sequence
  spacer sequence CTCN PAM
ccccgacaggccugccacgc

SEQ ID NO: 24201 - RNA, 20 nt, Artificial Sequence
  spacer sequence CTCN PAM
cccccagaccccucuccccg

SEQ ID NO: 24202 - RNA, 20 nt, Artificial Sequence
  spacer sequence CTCN PAM
ccagguaggcagcgaugccc

SEQ ID NO: 24203 - RNA, 20 nt, Artificial Sequence
  spacer sequence CTCN PAM
ucggggcgggcaucgcugcc

SEQ ID NO: 24204 - RNA, 20 nt, Artificial Sequence
  spacer sequence CTCN PAM
cgcagaucacgcaguaccgc

SEQ ID NO: 24205 - RNA, 20 nt, Artificial Sequence
  spacer sequence CTCN PAM
gacaccaccaagcugcugaa

SEQ ID NO: 24206 - RNA, 20 nt, Artificial Sequence
  spacer sequence CTCN PAM
gucaucucggacaccaccaa

SEQ ID NO: 24207 - RNA, 20 nt, Artificial Sequence
  spacer sequence CTCN PAM
cugaccccaacccccaugcc

SEQ ID NO: 24208 - RNA, 20 nt, Artificial Sequence
  spacer sequence CTCN PAM
ccacgggucagcaagagggc

SEQ ID NO: 24209 - RNA, 20 nt, Artificial Sequence
  spacer sequence CTCN PAM
ugcugacccguggggagccc

SEQ ID NO: 24210 - RNA, 20 nt, Artificial Sequence
  spacer sequence CTCN PAM
cugcccuucccaggcccucu

SEQ ID NO: 24211 - RNA, 20 nt, Artificial Sequence
  spacer sequence CTCN PAM
ccgacacauagaccgcggcg

SEQ ID NO: 24212 - RNA, 20 nt, Artificial Sequence
  spacer sequence CTCN PAM
uacaggaagaccuucccguc

SEQ ID NO: 24213 - RNA, 20 nt, Artificial Sequence
  spacer sequence CTCN PAM
cgcuggacgccucuuacagg

SEQ ID NO: 24214 - RNA, 20 nt, Artificial Sequence
  spacer sequence CTCN PAM
cagucaggggaguugggggu

SEQ ID NO: 24215 - RNA, 20 nt, Artificial Sequence
  spacer sequence CTCN PAM
ccugacugggagccuucuuc

SEQ ID NO: 24216 - RNA, 20 nt, Artificial Sequence
  spacer sequence CTCN PAM
ccgugcagacaggauggcgu

SEQ ID NO: 24217 - RNA, 20 nt, Artificial Sequence
  spacer sequence CTCN PAM
ggccacgacauccacgccau

SEQ ID NO: 24218 - RNA, 20 nt, Artificial Sequence
  spacer sequence CTCN PAM
caggacgugcccaggagagu

SEQ ID NO: 24219 - RNA, 20 nt, Artificial Sequence
  spacer sequence CTCN PAM
ugggcacguccugcgagguc

SEQ ID NO: 24220 - RNA, 20 nt, Artificial Sequence
  spacer sequence CTCN PAM
ccugggcacguccugcgagg

SEQ ID NO: 24221 - RNA, 20 nt, Artificial Sequence
  spacer sequence CTCN PAM
ccgucugcaagcccaacuac

SEQ ID NO: 24222 - RNA, 20 nt, Artificial Sequence
  spacer sequence CTCN PAM
cuucuuccucaccgucugca

SEQ ID NO: 24223 - RNA, 20 nt, Artificial Sequence
  spacer sequence CTCN PAM
gccaggcggggagcugggga

SEQ ID NO: 24224 - RNA, 20 nt, Artificial Sequence
  spacer sequence CTCN PAM
ccgccuggccgagccuuccg

SEQ ID NO: 24225 - RNA, 20 nt, Artificial Sequence
  spacer sequence CTCN PAM
acaugcaggggguggggcug

SEQ ID NO: 24226 - RNA, 20 nt, Artificial Sequence
  spacer sequence CTCN PAM
gggucggggcgcgucccgca

SEQ ID NO: 24227 - RNA, 20 nt, Artificial Sequence
  spacer sequence CTCN PAM
cccacaaaccgcaccguacg

SEQ ID NO: 24228 - RNA, 20 nt, Artificial Sequence
  spacer sequence CTCN PAM
uuccugcggcguacggugcg

SEQ ID NO: 24229 - RNA, 20 nt, Artificial Sequence
  spacer sequence CTCN PAM
gccccggcgggccccccggc

SEQ ID NO: 24230 - RNA, 20 nt, Artificial Sequence
  spacer sequence CTCN PAM
gccaccaugaucugccaaca

SEQ ID NO: 24231 - RNA, 20 nt, Artificial Sequence
  spacer sequence CTCN PAM
cuguuggcagaucauggugg

SEQ ID NO: 24232 - RNA, 20 nt, Artificial Sequence
  spacer sequence CTCN PAM
ggccucggugcccacaggga

SEQ ID NO: 24233 - RNA, 20 nt, Artificial Sequence
  spacer sequence CTCN PAM
gugcccacagggagggggcg

SEQ ID NO: 24234 - RNA, 20 nt, Artificial Sequence
  spacer sequence CTCN PAM
cugugggcaccgaggccuga

SEQ ID NO: 24235 - RNA, 20 nt, Artificial Sequence
  spacer sequence CTCN PAM
ggcgggcucccaucugcagu

SEQ ID NO: 24236 - RNA, 20 nt, Artificial Sequence
  spacer sequence CTCN PAM
gugaacauccacacuggggc

SEQ ID NO: 24237 - RNA, 20 nt, Artificial Sequence
  spacer sequence CTCN PAM
cagccguggugcccacaggc

SEQ ID NO: 24238 - RNA, 20 nt, Artificial Sequence
  spacer sequence CTCN PAM
ccgaggcggcaggggccgcg

SEQ ID NO: 24239 - RNA, 20 nt, Artificial Sequence
  spacer sequence CTCN PAM
gugagcaccugcaccggggc

SEQ ID NO: 24240 - RNA, 20 nt, Artificial Sequence
  spacer sequence CTCN PAM
gcuuggccuucgcggccccu

SEQ ID NO: 24241 - RNA, 20 nt, Artificial Sequence
  spacer sequence CTCN PAM
ucccgcugcugaugcugcuc

SEQ ID NO: 24242 - RNA, 20 nt, Artificial Sequence
  spacer sequence CTCN PAM
ucguuggucuccacguaggg

SEQ ID NO: 24243 - RNA, 20 nt, Artificial Sequence
  spacer sequence CTCN PAM
uuggucuccacguagggcau

SEQ ID NO: 24244 - RNA, 20 nt, Artificial Sequence
  spacer sequence CTCN PAM
acguagggcauggagagagu

SEQ ID NO: 24245 - RNA, 20 nt, Artificial Sequence
  spacer sequence CTCN PAM
augcccuacguggagaccaa

SEQ ID NO: 24246 - RNA, 20 nt, Artificial Sequence
  spacer sequence CTCN PAM
ccaugcccuacguggagacc

SEQ ID NO: 24247 - RNA, 20 nt, Artificial Sequence
  spacer sequence CTCN PAM
cuccaugcccuacguggaga

SEQ ID NO: 24248 - RNA, 20 nt, Artificial Sequence
  spacer sequence CTCN PAM
ucaagccggccaaggugggc

SEQ ID NO: 24249 - RNA, 20 nt, Artificial Sequence
  spacer sequence CTCN PAM
aggaaguacaaggauacgau

SEQ ID NO: 24250 - RNA, 20 nt, Artificial Sequence
  spacer sequence CTCN PAM
cccucgcggaggcgucuguc

SEQ ID NO: 24251 - RNA, 20 nt, Artificial Sequence
  spacer sequence CTCN PAM
cucgcggaggcgucugucca

SEQ ID NO: 24252 - RNA, 20 nt, Artificial Sequence
  spacer sequence CTCN PAM
aaaaauaauaauaauaaaua

SEQ ID NO: 24253 - RNA, 20 nt, Artificial Sequence
  spacer sequence CTCN PAM
aucucaaaaaauaauaauaa

SEQ ID NO: 24254 - RNA, 20 nt, Artificial Sequence
  spacer sequence CTCN PAM
cuugcccaagcuggcgugca

SEQ ID NO: 24255 - RNA, 20 nt, Artificial Sequence
  spacer sequence CTCN PAM
ugcccaagcuggcgugcagu

SEQ ID NO: 24256 - RNA, 20 nt, Artificial Sequence
  spacer sequence CTCN PAM
gcucacugcaaccuccaccu

SEQ ID NO: 24257 - RNA, 20 nt, Artificial Sequence
  spacer sequence CTCN PAM
cugcaaccuccaccuccugg

SEQ ID NO: 24258 - RNA, 20 nt, Artificial Sequence
  spacer sequence CTCN PAM
accuccuggguucaagcgau

SEQ ID NO: 24259 - RNA, 20 nt, Artificial Sequence
  spacer sequence CTCN PAM
uggguucaagcgauucuccu

SEQ ID NO: 24260 - RNA, 20 nt, Artificial Sequence
  spacer sequence CTCN PAM
ugccccagccucccgaguag

SEQ ID NO: 24261 - RNA, 20 nt, Artificial Sequence
  spacer sequence CTCN PAM
cgaguagcugggcucacagg

SEQ ID NO: 24262 - RNA, 20 nt, Artificial Sequence
  spacer sequence CTCN PAM
ggaggcuggggcaggagaau

SEQ ID NO: 24263 - RNA, 20 nt, Artificial Sequence
  spacer sequence CTCN PAM
caggcauaagccaacauacc

SEQ ID NO: 24264 - RNA, 20 nt, Artificial Sequence
  spacer sequence CTCN PAM
acuaaaaaauacaaaaaaau

SEQ ID NO: 24265 - RNA, 20 nt, Artificial Sequence
  spacer sequence CTCN PAM
ugcccucaggugaucugccc

SEQ ID NO: 24266 - RNA, 20 nt, Artificial Sequence
  spacer sequence CTCN PAM
ggugaucugcccaccucggc

SEQ ID NO: 24267 - RNA, 20 nt, Artificial Sequence
  spacer sequence CTCN PAM
gccucccaaagugcugggau

SEQ ID NO: 24268 - RNA, 20 nt, Artificial Sequence
  spacer sequence CTCN PAM
caaagugcugggauuacagg

SEQ ID NO: 24269 - RNA, 20 nt, Artificial Sequence
  spacer sequence CTCN PAM
cgccuguaaucccagcacuu

SEQ ID NO: 24270 - RNA, 20 nt, Artificial Sequence
  spacer sequence CTCN PAM
auuaaaaauacaaaaauuag

SEQ ID NO: 24271 - RNA, 20 nt, Artificial Sequence
  spacer sequence CTCN PAM
ccauuaaaaauacaaaaauu

SEQ ID NO: 24272 - RNA, 20 nt, Artificial Sequence
  spacer sequence CTCN PAM
ugaccuaggugauccacccg

SEQ ID NO: 24273 - RNA, 20 nt, Artificial Sequence
  spacer sequence CTCN PAM
caaagugcugggauuacagg

SEQ ID NO: 24274 - RNA, 20 nt, Artificial Sequence
  spacer sequence CTCN PAM
cgccuguaaucccagcacuu

SEQ ID NO: 24275 - RNA, 20 nt, Artificial Sequence
  spacer sequence CTCN PAM
ucacuaugugccuaacacgu

SEQ ID NO: 24276 - RNA, 20 nt, Artificial Sequence
  spacer sequence CTCN PAM
cuaugugccuaacacguuuc

SEQ ID NO: 24277 - RNA, 20 nt, Artificial Sequence
  spacer sequence CTCN PAM
aggaguggaaaagcggaggc

SEQ ID NO: 24278 - RNA, 20 nt, Artificial Sequence
  spacer sequence CTCN PAM
uggagcugauaggaauuaau

SEQ ID NO: 24279 - RNA, 20 nt, Artificial Sequence
  spacer sequence CTCN PAM
gcuuuuccacuccuggagcu

SEQ ID NO: 24280 - RNA, 20 nt, Artificial Sequence
  spacer sequence CTCN PAM
gggccuccgcuuuuccacuc

SEQ ID NO: 24281 - RNA, 20 nt, Artificial Sequence
  spacer sequence CTCN PAM
cugggccuccgcuuuuccac

SEQ ID NO: 24282 - RNA, 20 nt, Artificial Sequence
  spacer sequence CTCN PAM
ccauuagcagaggugaacuc

SEQ ID NO: 24283 - RNA, 20 nt, Artificial Sequence
  spacer sequence CTCN PAM
gcuaauggugaggcuggugc

SEQ ID NO: 24284 - RNA, 20 nt, Artificial Sequence
  spacer sequence CTCN PAM
gacccugaggcuucggagcc

SEQ ID NO: 24285 - RNA, 20 nt, Artificial Sequence
  spacer sequence CTCN PAM
gggucugaguucaccucugc

SEQ ID NO: 24286 - RNA, 20 nt, Artificial Sequence
  spacer sequence CTCN PAM
gaagccucagggucugaguu

SEQ ID NO: 24287 - RNA, 20 nt, Artificial Sequence
  spacer sequence CTCN PAM
ggccuccccgcccccuccag

SEQ ID NO: 24288 - RNA, 20 nt, Artificial Sequence
  spacer sequence CTCN PAM
ccgcccccuccaggccccca

SEQ ID NO: 24289 - RNA, 20 nt, Artificial Sequence
  spacer sequence CTCN PAM
aggcccccagcccccgaccc

SEQ ID NO: 24290 - RNA, 20 nt, Artificial Sequence
  spacer sequence CTCN PAM
gaccacaccuuggucagaag

SEQ ID NO: 24291 - RNA, 20 nt, Artificial Sequence
  spacer sequence CTCN PAM
ccuccuagcaccugcccaca

SEQ ID NO: 24292 - RNA, 20 nt, Artificial Sequence
  spacer sequence CTCN PAM
uagcaccugcccacaguucc

SEQ ID NO: 24293 - RNA, 20 nt, Artificial Sequence
  spacer sequence CTCN PAM
guuccucuggagcuccuacu

SEQ ID NO: 24294 - RNA, 20 nt, Artificial Sequence
  spacer sequence CTCN PAM
ggagcuccuacucgacccgc

SEQ ID NO: 24295 - RNA, 20 nt, Artificial Sequence
  spacer sequence CTCN PAM
agaggaaccgaggggggucc

SEQ ID NO: 24296 - RNA, 20 nt, Artificial Sequence
  spacer sequence CTCN PAM
uacucgacccgcacagccca

SEQ ID NO: 24297 - RNA, 20 nt, Artificial Sequence
  spacer sequence CTCN PAM
acccgcacagcccaaguccu

SEQ ID NO: 24298 - RNA, 20 nt, Artificial Sequence
  spacer sequence CTCN PAM
gccccaccccccauccgccg

SEQ ID NO: 24299 - RNA, 20 nt, Artificial Sequence
  spacer sequence CTCN PAM
gggcggggcaggaccggggu

SEQ ID NO: 24300 - RNA, 20 nt, Artificial Sequence
  spacer sequence CTCN PAM
ggucccccagcgcggggguc

SEQ ID NO: 24301 - RNA, 20 nt, Artificial Sequence
  spacer sequence CTCN PAM
gcgggcgggcggaaccgagg

SEQ ID NO: 24302 - RNA, 20 nt, Artificial Sequence
  spacer sequence CTCN PAM
guuccgcccgcccgcagaga

SEQ ID NO: 24303 - RNA, 20 nt, Artificial Sequence
  spacer sequence CTCN PAM
cccgggccccagcgcgaccc

SEQ ID NO: 24304 - RNA, 20 nt, Artificial Sequence
  spacer sequence CTCN PAM
acgaaguagaagcagggcag

SEQ ID NO: 24305 - RNA, 20 nt, Artificial Sequence
  spacer sequence CTCN PAM
uugguggagaucauggugcc

SEQ ID NO: 24306 - RNA, 20 nt, Artificial Sequence
  spacer sequence CTCN PAM
accaaggagaagaacaagau

SEQ ID NO: 24307 - RNA, 20 nt, Artificial Sequence
  spacer sequence CTCN PAM
agccacggccugcggcgccc

SEQ ID NO: 24308 - RNA, 20 nt, Artificial Sequence
  spacer sequence CTCN PAM
ccuccagccacggccugcgg

SEQ ID NO: 24309 - RNA, 20 nt, Artificial Sequence
  spacer sequence CTCN PAM
agcgccgcuuucuccccucc

SEQ ID NO: 24310 - RNA, 20 nt, Artificial Sequence
  spacer sequence CTCN PAM
gccugcgcgccccccuccag

SEQ ID NO: 24311 - RNA, 20 nt, Artificial Sequence
  spacer sequence CTCN PAM
cccgggcuccgccugcgcgc

SEQ ID NO: 24312 - RNA, 20 nt, Artificial Sequence
  spacer sequence CTCN PAM
cccgccggcgccggccaccg

SEQ ID NO: 24313 - RNA, 20 nt, Artificial Sequence
  spacer sequence CTCN PAM
guuuccccgaccgccccucc

SEQ ID NO: 24314 - RNA, 20 nt, Artificial Sequence
  spacer sequence CTCN PAM
gcagccucaguuuccccgac

SEQ ID NO: 24315 - RNA, 20 nt, Artificial Sequence
  spacer sequence CTCN PAM
cugcagccucaguuuccccg

SEQ ID NO: 24316 - RNA, 20 nt, Artificial Sequence
  spacer sequence CTCN PAM
ccgcgccccggcccagcacg

SEQ ID NO: 24317 - RNA, 20 nt, Artificial Sequence
  spacer sequence CTCN PAM
gcgaucccggccccgacccc

SEQ ID NO: 24318 - RNA, 20 nt, Artificial Sequence
  spacer sequence CTCN PAM
ucggcgaucccggccccgac

SEQ ID NO: 24319 - RNA, 20 nt, Artificial Sequence
  spacer sequence CTCN PAM
gggcgggagccaguccccgc

SEQ ID NO: 24320 - RNA, 20 nt, Artificial Sequence
  spacer sequence CTCN PAM
cgcccggagaccccccgccc

SEQ ID NO: 24321 - RNA, 20 nt, Artificial Sequence
  spacer sequence CTCN PAM
cggaugccccccaccaccac

SEQ ID NO: 24322 - RNA, 20 nt, Artificial Sequence
  spacer sequence CTCN PAM
gccgcccggaaccccaguuc

SEQ ID NO: 24323 - RNA, 20 nt, Artificial Sequence
  spacer sequence CTCN PAM
uccgccgcccggaaccccag

SEQ ID NO: 24324 - RNA, 20 nt, Artificial Sequence
  spacer sequence CTCN PAM
ccuggcgcggccggcgccca

SEQ ID NO: 24325 - RNA, 20 nt, Artificial Sequence
  spacer sequence CTCN PAM
uccguggggcggggccggga

SEQ ID NO: 24326 - RNA, 20 nt, Artificial Sequence
  spacer sequence CTCN PAM
guggggcggggccgggagcc

SEQ ID NO: 24327 - RNA, 20 nt, Artificial Sequence
  spacer sequence CTCN PAM
cggccccgccccacggagga

SEQ ID NO: 24328 - RNA, 20 nt, Artificial Sequence
  spacer sequence CTCN PAM
ccuucccggcucccggcccc

SEQ ID NO: 24329 - RNA, 20 nt, Artificial Sequence
  spacer sequence CTCN PAM
cccgucccccuccccuuccc

SEQ ID NO: 24330 - RNA, 20 nt, Artificial Sequence
  spacer sequence CTCN PAM
ccucccccgucccccucccc

SEQ ID NO: 24331 - RNA, 20 nt, Artificial Sequence
  spacer sequence CTCN PAM
gggccggacccuccccuccc

SEQ ID NO: 24332 - RNA, 20 nt, Artificial Sequence
  spacer sequence CTCN PAM
uugucugggcgcguccuccg

SEQ ID NO: 24333 - RNA, 20 nt, Artificial Sequence
  spacer sequence CTCN PAM
gcaggccccgcgcaccgucc

SEQ ID NO: 24334 - RNA, 20 nt, Artificial Sequence
  spacer sequence CTCN PAM
cuggcgccgccucccaccgc

SEQ ID NO: 24335 - RNA, 20 nt, Artificial Sequence
  spacer sequence CTCN PAM
caccgccgggggucucgggg

SEQ ID NO: 24336 - RNA, 20 nt, Artificial Sequence
  spacer sequence CTCN PAM
ggggucucaggucugcgcga

SEQ ID NO: 24337 - RNA, 20 nt, Artificial Sequence
  spacer sequence CTCN PAM
ggucugcgcgagcggcuggc

SEQ ID NO: 24338 - RNA, 20 nt, Artificial Sequence
  spacer sequence CTCN PAM
cgcagaccugagacccccga

SEQ ID NO: 24339 - RNA, 20 nt, Artificial Sequence
  spacer sequence CTCN PAM
ggggucgcguccuccucccu

SEQ ID NO: 24340 - RNA, 20 nt, Artificial Sequence
  spacer sequence CTCN PAM
ucccuucgggccugcggcgg

SEQ ID NO: 24341 - RNA, 20 nt, Artificial Sequence
  spacer sequence CTCN PAM
cuucgggccugcggcgguga

SEQ ID NO: 24342 - RNA, 20 nt, Artificial Sequence
  spacer sequence CTCN PAM
ccucccggguggcugcgguc

SEQ ID NO: 24343 - RNA, 20 nt, Artificial Sequence
  spacer sequence CTCN PAM
cggguggcugcggucggccc

SEQ ID NO: 24344 - RNA, 20 nt, Artificial Sequence
  spacer sequence CTCN PAM
auggcgccccccgggccgac

SEQ ID NO: 24345 - RNA, 20 nt, Artificial Sequence
  spacer sequence CTCN PAM
gcccccgucucgauggcgcc

SEQ ID NO: 24346 - RNA, 20 nt, Artificial Sequence
  spacer sequence CTCN PAM
gacugucuccgugucucuca

SEQ ID NO: 24347 - RNA, 20 nt, Artificial Sequence
  spacer sequence CTCN PAM
gugucucucacggucucucg

SEQ ID NO: 24348 - RNA, 20 nt, Artificial Sequence
  spacer sequence CTCN PAM
cacggucucucgccggcucc

SEQ ID NO: 24349 - RNA, 20 nt, Artificial Sequence
  spacer sequence CTCN PAM
cggucucucgccggcuccga

SEQ ID NO: 24350 - RNA, 20 nt, Artificial Sequence
  spacer sequence CTCN PAM
cgccggcuccgacugccccc

SEQ ID NO: 24351 - RNA, 20 nt, Artificial Sequence
  spacer sequence CTCN PAM
ccggcuccgacugcccccgc

SEQ ID NO: 24352 - RNA, 20 nt, Artificial Sequence
  spacer sequence CTCN PAM
gacugcccccgccccgcgcc

SEQ ID NO: 24353 - RNA, 20 nt, Artificial Sequence
  spacer sequence CTCN PAM
gcccgccccuccgcggagcc

SEQ ID NO: 24354 - RNA, 20 nt, Artificial Sequence
  spacer sequence CTCN PAM
gcggagcccgccgcucgcug

SEQ ID NO: 24355 - RNA, 20 nt, Artificial Sequence
  spacer sequence CTCN PAM
gcggaggggcgggcggaggc

SEQ ID NO: 24356 - RNA, 20 nt, Artificial Sequence
  spacer sequence CTCN PAM
cuggugcgcguuuccauggc

SEQ ID NO: 24357 - RNA, 20 nt, Artificial Sequence
  spacer sequence CTCN PAM
ccauggaaacgcgcaccagc

SEQ ID NO: 24358 - RNA, 20 nt, Artificial Sequence
  spacer sequence CTCN PAM
cagggcgcccggagcaucgg

SEQ ID NO: 24359 - RNA, 20 nt, Artificial Sequence
  spacer sequence CTCN PAM
gggcgcccugggagccucgc

SEQ ID NO: 24360 - RNA, 20 nt, Artificial Sequence
  spacer sequence CTCN PAM
gaugcuccgggcgcccuggg

SEQ ID NO: 24361 - RNA, 20 nt, Artificial Sequence
  spacer sequence CTCN PAM
uuugucuccgaugcuccggg

SEQ ID NO: 24362 - RNA, 20 nt, Artificial Sequence
  spacer sequence CTCN PAM
cccagcucuuuugucuccga

SEQ ID NO: 24363 - RNA, 20 nt, Artificial Sequence
  spacer sequence CTCN PAM
cggugccucccucccuuccc

SEQ ID NO: 24364 - RNA, 20 nt, Artificial Sequence
  spacer sequence CTCN PAM
cucccuuccccccgcacuca

SEQ ID NO: 24365 - RNA, 20 nt, Artificial Sequence
  spacer sequence CTCN PAM
cuuccccccgcacucacccu

SEQ ID NO: 24366 - RNA, 20 nt, Artificial Sequence
  spacer sequence CTCN PAM
cccucgcccccuccgccgcg

SEQ ID NO: 24367 - RNA, 20 nt, Artificial Sequence
  spacer sequence CTCN PAM
cccccuccgccgcgccgggg

SEQ ID NO: 24368 - RNA, 20 nt, Artificial Sequence
  spacer sequence CTCN PAM
gccgcgccgggguccacccu

SEQ ID NO: 24369 - RNA, 20 nt, Artificial Sequence
  spacer sequence CTCN PAM
gccuggccgcagccgcucgg

SEQ ID NO: 24370 - RNA, 20 nt, Artificial Sequence
  spacer sequence CTCN PAM
gugcgcacggcgggauugcg

SEQ ID NO: 24371 - RNA, 20 nt, Artificial Sequence
  spacer sequence CTCN PAM
ggacccgcacucgggcagug

SEQ ID NO: 24372 - RNA, 20 nt, Artificial Sequence
  spacer sequence CTCN PAM
ggcagugccugcugucugcg

SEQ ID NO: 24373 - RNA, 20 nt, Artificial Sequence
  spacer sequence CTCN PAM
uccauaugcgcagcccugcg

SEQ ID NO: 24374 - RNA, 20 nt, Artificial Sequence
  spacer sequence CTCN PAM
auaugcgcagcccugcgggg

SEQ ID NO: 24375 - RNA, 20 nt, Artificial Sequence
  spacer sequence CTCN PAM
guuuccccaucccuacaacg

SEQ ID NO: 24376 - RNA, 20 nt, Artificial Sequence
  spacer sequence CTCN PAM
gauugcgacccagggugccc

SEQ ID NO: 24377 - RNA, 20 nt, Artificial Sequence
  spacer sequence CTCN PAM
gggccccaaacggcaggauu

SEQ ID NO: 24378 - RNA, 20 nt, Artificial Sequence
  spacer sequence CTCN PAM
ggccuguaaucccagcacuu

SEQ ID NO: 24379 - RNA, 20 nt, Artificial Sequence
  spacer sequence CTCN PAM
caaagugcugggauuacagg

SEQ ID NO: 24380 - RNA, 20 nt, Artificial Sequence
  spacer sequence CTCN PAM
accucccaaagugcugggau

SEQ ID NO: 24381 - RNA, 20 nt, Artificial Sequence
  spacer sequence CTCN PAM
ugauccgcccgccucgaccu

SEQ ID NO: 24382 - RNA, 20 nt, Artificial Sequence
  spacer sequence CTCN PAM
ugcccucgugauccgcccgc

SEQ ID NO: 24383 - RNA, 20 nt, Artificial Sequence
  spacer sequence CTCN PAM
aacuccugcccucgugaucc

SEQ ID NO: 24384 - RNA, 20 nt, Artificial Sequence
  spacer sequence CTCN PAM
acuaaaaauacaaaaauuuu

SEQ ID NO: 24385 - RNA, 20 nt, Artificial Sequence
  spacer sequence CTCN PAM
ugccuguaaucccagcuacu

SEQ ID NO: 24386 - RNA, 20 nt, Artificial Sequence
  spacer sequence CTCN PAM
ggaggcugaggcaggagaau

SEQ ID NO: 24387 - RNA, 20 nt, Artificial Sequence
  spacer sequence CTCN PAM
cgaguagcugggauuacagg

SEQ ID NO: 24388 - RNA, 20 nt, Artificial Sequence
  spacer sequence CTCN PAM
gccucccgaguagcugggau

SEQ ID NO: 24389 - RNA, 20 nt, Artificial Sequence
  spacer sequence CTCN PAM
caaagugcugggauuauagg

SEQ ID NO: 24390 - RNA, 20 nt, Artificial Sequence
  spacer sequence CTCN PAM
gccucccaaagugcugggau

SEQ ID NO: 24391 - RNA, 20 nt, Artificial Sequence
  spacer sequence CTCN PAM
cgccucugccucccaaagug

SEQ ID NO: 24392 - RNA, 20 nt, Artificial Sequence
  spacer sequence CTCN PAM
agggauccucccgccucugc

SEQ ID NO: 24393 - RNA, 20 nt, Artificial Sequence
  spacer sequence CTCN PAM
uggccucaagggauccuccc

SEQ ID NO: 24394 - RNA, 20 nt, Artificial Sequence
  spacer sequence CTCN PAM
acuaaaaauauaaaaauuag

SEQ ID NO: 24395 - RNA, 20 nt, Artificial Sequence
  spacer sequence CTCN PAM
caucuggcugggauuacagg

SEQ ID NO: 24396 - RNA, 20 nt, Artificial Sequence
  spacer sequence CTCN PAM
gccucccaucuggcugggau

SEQ ID NO: 24397 - RNA, 20 nt, Artificial Sequence
  spacer sequence CTCN PAM
ugccucagccucccaucugg

SEQ ID NO: 24398 - RNA, 20 nt, Artificial Sequence
  spacer sequence CTCN PAM
cagguucaagcaauucuccu

SEQ ID NO: 24399 - RNA, 20 nt, Artificial Sequence
  spacer sequence CTCN PAM
gccucccagguucaagcaau

SEQ ID NO: 24400 - RNA, 20 nt, Artificial Sequence
  spacer sequence CTCN PAM
cugcaaccuccgccucccag

SEQ ID NO: 24401 - RNA, 20 nt, Artificial Sequence
  spacer sequence CTCN PAM
gcucacugcaaccuccgccu

SEQ ID NO: 24402 - RNA, 20 nt, Artificial Sequence
  spacer sequence CTCN PAM
agccugggcgacagaaggag

SEQ ID NO: 24403 - RNA, 20 nt, Artificial Sequence
  spacer sequence CTCN PAM
uucugucgcccaggcuggag

SEQ ID NO: 24404 - RNA, 20 nt, Artificial Sequence
  spacer sequence CTCN PAM
aucucaaaaaaaaaaaaaaa

SEQ ID NO: 24405 - RNA, 20 nt, Artificial Sequence
  spacer sequence CTCN PAM
aaaaaaaaaaaaaaaacaaa

SEQ ID NO: 24406 - RNA, 20 nt, Artificial Sequence
  spacer sequence CTCN PAM
agaggguuggagcccugcua

SEQ ID NO: 24407 - RNA, 20 nt, Artificial Sequence
  spacer sequence CTCN PAM
ggagucacuguuuguuuguu

SEQ ID NO: 24408 - RNA, 20 nt, Artificial Sequence
  spacer sequence CTCN PAM
aacccucuggagucacuguu

SEQ ID NO: 24409 - RNA, 20 nt, Artificial Sequence
  spacer sequence CTCN PAM
uaacaggcacugcugccccc

SEQ ID NO: 24410 - RNA, 20 nt, Artificial Sequence
  spacer sequence CTCN PAM
ucccgggggcagcagugccu

SEQ ID NO: 24411 - RNA, 20 nt, Artificial Sequence
  spacer sequence CTCN PAM
augguguugcuaccuuugga

SEQ ID NO: 24412 - RNA, 20 nt, Artificial Sequence
  spacer sequence CTCN PAM
gaggcagcccagcuuccugg

SEQ ID NO: 24413 - RNA, 20 nt, Artificial Sequence
  spacer sequence CTCN PAM
gaguccauccaaagguagca

SEQ ID NO: 24414 - RNA, 20 nt, Artificial Sequence
  spacer sequence CTCN PAM
ccaggcaguccgugcagucc

SEQ ID NO: 24415 - RNA, 20 nt, Artificial Sequence
  spacer sequence CTCN PAM
gggaggcccugugagcaguu

SEQ ID NO: 24416 - RNA, 20 nt, Artificial Sequence
  spacer sequence CTCN PAM
ccgagccccccugcaggaac

SEQ ID NO: 24417 - RNA, 20 nt, Artificial Sequence
  spacer sequence CTCN PAM
cagggccuccccgagccccc

SEQ ID NO: 24418 - RNA, 20 nt, Artificial Sequence
  spacer sequence CTCN PAM
ccaacagcccuggagaaggg

SEQ ID NO: 24419 - RNA, 20 nt, Artificial Sequence
  spacer sequence CTCN PAM
agggcuguuggggaggaaca

SEQ ID NO: 24420 - RNA, 20 nt, Artificial Sequence
  spacer sequence CTCN PAM
caggccaggaaaacagccgc

SEQ ID NO: 24421 - RNA, 20 nt, Artificial Sequence
  spacer sequence CTCN PAM
cacaggccaggaaaacagcc

SEQ ID NO: 24422 - RNA, 20 nt, Artificial Sequence
  spacer sequence CTCN PAM
ggccccgccucucacaggcc

SEQ ID NO: 24423 - RNA, 20 nt, Artificial Sequence
  spacer sequence CTCN PAM
cugggggaggaggaggaaaa

SEQ ID NO: 24424 - RNA, 20 nt, Artificial Sequence
  spacer sequence CTCN PAM
gggggaggaggaggaaaaug

SEQ ID NO: 24425 - RNA, 20 nt, Artificial Sequence
  spacer sequence CTCN PAM
cccagagagcuguuuguggu

SEQ ID NO: 24426 - RNA, 20 nt, Artificial Sequence
  spacer sequence CTCN PAM
ucccccagagagcuguuugu

SEQ ID NO: 24427 - RNA, 20 nt, Artificial Sequence
  spacer sequence CTCN PAM
uccucccccagagagcuguu

SEQ ID NO: 24428 - RNA, 20 nt, Artificial Sequence
  spacer sequence CTCN PAM
ugaaaaucaauugcauuuuc

SEQ ID NO: 24429 - RNA, 20 nt, Artificial Sequence
  spacer sequence CTCN PAM
gaaggcuccugaaaaucaau

SEQ ID NO: 24430 - RNA, 20 nt, Artificial Sequence
  spacer sequence CTCN PAM
ugaccucagaaggcuccuga

SEQ ID NO: 24431 - RNA, 20 nt, Artificial Sequence
  spacer sequence CTCN PAM
cacuccugaccucagaaggc

SEQ ID NO: 24432 - RNA, 20 nt, Artificial Sequence
  spacer sequence CTCN PAM
cccacuccugaccucagaag

SEQ ID NO: 24433 - RNA, 20 nt, Artificial Sequence
  spacer sequence CTCN PAM
uggcagcuuggggguccaac

SEQ ID NO: 24434 - RNA, 20 nt, Artificial Sequence
  spacer sequence CTCN PAM
cccagaucuucuguuggacc

SEQ ID NO: 24435 - RNA, 20 nt, Artificial Sequence
  spacer sequence CTCN PAM
gggucuucucccccuaggau

SEQ ID NO: 24436 - RNA, 20 nt, Artificial Sequence
  spacer sequence CTCN PAM
cccuaggaucaccaguggug

SEQ ID NO: 24437 - RNA, 20 nt, Artificial Sequence
  spacer sequence CTCN PAM
accacuggugauccuagggg

SEQ ID NO: 24438 - RNA, 20 nt, Artificial Sequence
  spacer sequence CTCN PAM
auggccaggccugccccauc

SEQ ID NO: 24439 - RNA, 20 nt, Artificial Sequence
  spacer sequence CTCN PAM
gccaagcaacgugcccucca

SEQ ID NO: 24440 - RNA, 20 nt, Artificial Sequence
  spacer sequence CTCN PAM
agcccaggccccucagccaa

SEQ ID NO: 24441 - RNA, 20 nt, Artificial Sequence
  spacer sequence CTCN PAM
agcccaggccccacacucaa

SEQ ID NO: 24442 - RNA, 20 nt, Artificial Sequence
  spacer sequence CTCN PAM
caucacucaagcccaggccc

SEQ ID NO: 24443 - RNA, 20 nt, Artificial Sequence
  spacer sequence CTCN PAM
cccaucacucaagcccaggc

SEQ ID NO: 24444 - RNA, 20 nt, Artificial Sequence
  spacer sequence CTCN PAM
gaacucucccaucacucaag

SEQ ID NO: 24445 - RNA, 20 nt, Artificial Sequence
  spacer sequence CTCN PAM
ggccugcucggaacucuccc

SEQ ID NO: 24446 - RNA, 20 nt, Artificial Sequence
  spacer sequence CTCN PAM
accccuccggccugcucgga

SEQ ID NO: 24447 - RNA, 20 nt, Artificial Sequence
  spacer sequence CTCN PAM
aaacuuuuauuuaaaaauga

SEQ ID NO: 24448 - RNA, 20 nt, Artificial Sequence
  spacer sequence CTCN PAM
aaauaauaguaauaauaaua

SEQ ID NO: 24449 - RNA, 20 nt, Artificial Sequence
  spacer sequence CTCN PAM
ugcucugucgcccaggcugg

SEQ ID NO: 24450 - RNA, 20 nt, Artificial Sequence
  spacer sequence CTCN PAM
gucgcccaggcuggagugca

SEQ ID NO: 24451 - RNA, 20 nt, Artificial Sequence
  spacer sequence CTCN PAM
agccugggcgacagagcaag

SEQ ID NO: 24452 - RNA, 20 nt, Artificial Sequence
  spacer sequence CTCN PAM
cugcaaccucccaccuccug

SEQ ID NO: 24453 - RNA, 20 nt, Artificial Sequence
  spacer sequence CTCN PAM
caccuccuggguucaaguga

SEQ ID NO: 24454 - RNA, 20 nt, Artificial Sequence
  spacer sequence CTCN PAM
uggguucaagugauucuccc

SEQ ID NO: 24455 - RNA, 20 nt, Artificial Sequence
  spacer sequence CTCN PAM
cuccucagccucccgaguag

SEQ ID NO: 24456 - RNA, 20 nt, Artificial Sequence
  spacer sequence CTCN PAM
ucagccucccgaguaguugg

SEQ ID NO: 24457 - RNA, 20 nt, Artificial Sequence
  spacer sequence CTCN PAM
gccucccgaguaguugggau

SEQ ID NO: 24458 - RNA, 20 nt, Artificial Sequence
  spacer sequence CTCN PAM
cgaguaguugggauuauagg

SEQ ID NO: 24459 - RNA, 20 nt, Artificial Sequence
  spacer sequence CTCN PAM
ggaggcugaggagggagaau

SEQ ID NO: 24460 - RNA, 20 nt, Artificial Sequence
  spacer sequence CTCN PAM
uucuacuaaaaauacaaaaa

SEQ ID NO: 24461 - RNA, 20 nt, Artificial Sequence
  spacer sequence CTCN PAM
ccauguuggucaggcuggug

SEQ ID NO: 24462 - RNA, 20 nt, Artificial Sequence
  spacer sequence CTCN PAM
ugaccucagcugaucugcug

SEQ ID NO: 24463 - RNA, 20 nt, Artificial Sequence
  spacer sequence CTCN PAM
gcugaucugcugccucagcc

SEQ ID NO: 24464 - RNA, 20 nt, Artificial Sequence
  spacer sequence CTCN PAM
gccucccaaaguacugggau

SEQ ID NO: 24465 - RNA, 20 nt, Artificial Sequence
  spacer sequence CTCN PAM
caaaguacugggaugacagg

SEQ ID NO: 24466 - RNA, 20 nt, Artificial Sequence
  spacer sequence CTCN PAM
ccugucaucccaguacuuug

SEQ ID NO: 24467 - RNA, 20 nt, Artificial Sequence
  spacer sequence CTCN PAM
guggcuccccugucauccca

SEQ ID NO: 24468 - RNA, 20 nt, Artificial Sequence
  spacer sequence CTCN PAM
caaaaaaaaaaaaaaaggcu

SEQ ID NO: 24469 - RNA, 20 nt, Artificial Sequence
  spacer sequence CTCN PAM
gucucccaaaaaaaaaaaaa

SEQ ID NO: 24470 - RNA, 20 nt, Artificial Sequence
  spacer sequence CTCN PAM
gucgucuaggcuggagugca

SEQ ID NO: 24471 - RNA, 20 nt, Artificial Sequence
  spacer sequence CTCN PAM
agccuagacgacagagugca

SEQ ID NO: 24472 - RNA, 20 nt, Artificial Sequence
  spacer sequence CTCN PAM
gcucacugcaagcuccaccu

SEQ ID NO: 24473 - RNA, 20 nt, Artificial Sequence
  spacer sequence CTCN PAM
cugcaagcuccaccucccgg

SEQ ID NO: 24474 - RNA, 20 nt, Artificial Sequence
  spacer sequence CTCN PAM
accucccggguucacgccau

SEQ ID NO: 24475 - RNA, 20 nt, Artificial Sequence
  spacer sequence CTCN PAM
cggguucacgccauucuccu

SEQ ID NO: 24476 - RNA, 20 nt, Artificial Sequence
  spacer sequence CTCN PAM
ugccucagccucccgaguag

SEQ ID NO: 24477 - RNA, 20 nt, Artificial Sequence
  spacer sequence CTCN PAM
gccucccgaguagcugggac

SEQ ID NO: 24478 - RNA, 20 nt, Artificial Sequence
  spacer sequence CTCN PAM
cgaguagcugggaccgcagg

SEQ ID NO: 24479 - RNA, 20 nt, Artificial Sequence
  spacer sequence CTCN PAM
ggaggcugaggcaggagaau

SEQ ID NO: 24480 - RNA, 20 nt, Artificial Sequence
  spacer sequence CTCN PAM
acuaaaaauacaaaagaauu

SEQ ID NO: 24481 - RNA, 20 nt, Artificial Sequence
  spacer sequence CTCN PAM
ugaccucgugauccgcccgu

SEQ ID NO: 24482 - RNA, 20 nt, Artificial Sequence
  spacer sequence CTCN PAM
ugauccgcccgucuuggccu

SEQ ID NO: 24483 - RNA, 20 nt, Artificial Sequence
  spacer sequence CTCN PAM
caaagugcugggauuacagg

SEQ ID NO: 24484 - RNA, 20 nt, Artificial Sequence
  spacer sequence CTCN PAM
cgccuguaaucccagcacuu

SEQ ID NO: 24485 - RNA, 20 nt, Artificial Sequence
  spacer sequence CTCN PAM
cggcagaggggaaauggggc

SEQ ID NO: 24486 - RNA, 20 nt, Artificial Sequence
  spacer sequence CTCN PAM
gccgggagccggaagcucug

SEQ ID NO: 24487 - RNA, 20 nt, Artificial Sequence
  spacer sequence CTCN PAM
cgugggccaggccccauuuc

SEQ ID NO: 24488 - RNA, 20 nt, Artificial Sequence
  spacer sequence CTCN PAM
cccgugggccaggccccauu

SEQ ID NO: 24489 - RNA, 20 nt, Artificial Sequence
  spacer sequence CTCN PAM
gcucucccgugggccaggcc

SEQ ID NO: 24490 - RNA, 20 nt, Artificial Sequence
  spacer sequence CTCN PAM
gcccaccccggauccuaccu

SEQ ID NO: 24491 - RNA, 20 nt, Artificial Sequence
  spacer sequence CTCN PAM
cugcccaccccggauccuac

SEQ ID NO: 24492 - RNA, 20 nt, Artificial Sequence
  spacer sequence CTCN PAM
cucucugcccaccccggauc

SEQ ID NO: 24493 - RNA, 20 nt, Artificial Sequence
  spacer sequence CTCN PAM
cccucucugcccaccccgga

SEQ ID NO: 24494 - RNA, 20 nt, Artificial Sequence
  spacer sequence CTCN PAM
guccaagccagcucucccuc

SEQ ID NO: 24495 - RNA, 20 nt, Artificial Sequence
  spacer sequence CTCN PAM
caggguccauggcacagccc

SEQ ID NO: 24496 - RNA, 20 nt, Artificial Sequence
  spacer sequence CTCN PAM
agaccucaguuucaccuugg

SEQ ID NO: 24497 - RNA, 20 nt, Artificial Sequence
  spacer sequence CTCN PAM
guuucaccuuggaaaugagc

SEQ ID NO: 24498 - RNA, 20 nt, Artificial Sequence
  spacer sequence CTCN PAM
uuuccaaggugaaacugagg

SEQ ID NO: 24499 - RNA, 20 nt, Artificial Sequence
  spacer sequence CTCN PAM
auuuuuuacaaaggggcuca

SEQ ID NO: 24500 - RNA, 20 nt, Artificial Sequence
  spacer sequence CTCN PAM
ccuccauuuuuuacaaaggg

SEQ ID NO: 24501 - RNA, 20 nt, Artificial Sequence
  spacer sequence CTCN PAM
acgcaggacugccagcucca

SEQ ID NO: 24502 - RNA, 20 nt, Artificial Sequence
  spacer sequence CTCN PAM
acugcccugagccccccggu

SEQ ID NO: 24503 - RNA, 20 nt, Artificial Sequence
  spacer sequence CTCN PAM
gggcaguggagcuggcaguc

SEQ ID NO: 24504 - RNA, 20 nt, Artificial Sequence
  spacer sequence CTCN PAM
auucagaaucaaggcaggca

SEQ ID NO: 24505 - RNA, 20 nt, Artificial Sequence
  spacer sequence CTCN PAM
uccaucugagccucuuccuu

SEQ ID NO: 24506 - RNA, 20 nt, Artificial Sequence
  spacer sequence CTCN PAM
cccaucugacccccuuuccu

SEQ ID NO: 24507 - RNA, 20 nt, Artificial Sequence
  spacer sequence CTCN PAM
gggccucccccaucugaccc

SEQ ID NO: 24508 - RNA, 20 nt, Artificial Sequence
  spacer sequence CTCN PAM
gauggaggagggggcccaga

SEQ ID NO: 24509 - RNA, 20 nt, Artificial Sequence
  spacer sequence CTCN PAM
aucugagccccuucccuucu

SEQ ID NO: 24510 - RNA, 20 nt, Artificial Sequence
  spacer sequence CTCN PAM
uccaucugagccccuucccu

SEQ ID NO: 24511 - RNA, 20 nt, Artificial Sequence
  spacer sequence CTCN PAM
gcucugcuucuguaaaagcg

SEQ ID NO: 24512 - RNA, 20 nt, Artificial Sequence
  spacer sequence CTCN PAM
gcuucuguaaaagcggggga

SEQ ID NO: 24513 - RNA, 20 nt, Artificial Sequence
  spacer sequence CTCN PAM
cccgcuuuuacagaagcaga

SEQ ID NO: 24514 - RNA, 20 nt, Artificial Sequence
  spacer sequence CTCN PAM
cucugcccuuuccuccgcua

SEQ ID NO: 24515 - RNA, 20 nt, Artificial Sequence
  spacer sequence CTCN PAM
gcccuuuccuccgcuacucu

SEQ ID NO: 24516 - RNA, 20 nt, Artificial Sequence
  spacer sequence CTCN PAM
gcuacucucaggaaccccgg

SEQ ID NO: 24517 - RNA, 20 nt, Artificial Sequence
  spacer sequence CTCN PAM
caggaaccccgggguuagca

SEQ ID NO: 24518 - RNA, 20 nt, Artificial Sequence
  spacer sequence CTCN PAM
ggaaccccgggguuagcacc

SEQ ID NO: 24519 - RNA, 20 nt, Artificial Sequence
  spacer sequence CTCN PAM
ggucauaggcacccagcacc

SEQ ID NO: 24520 - RNA, 20 nt, Artificial Sequence
  spacer sequence CTCN PAM
cgccgccucaggucauaggc

SEQ ID NO: 24521 - RNA, 20 nt, Artificial Sequence
  spacer sequence CTCN PAM
cccgccgccucaggucauag

SEQ ID NO: 24522 - RNA, 20 nt, Artificial Sequence
  spacer sequence CTCN PAM
ccugaagcagcaucaggucg

SEQ ID NO: 24523 - RNA, 20 nt, Artificial Sequence
  spacer sequence CTCN PAM
caccugaagcagcaucaggu

SEQ ID NO: 24524 - RNA, 20 nt, Artificial Sequence
  spacer sequence CTCN PAM
ggaggccgacguuagccagg

SEQ ID NO: 24525 - RNA, 20 nt, Artificial Sequence
  spacer sequence CTCN PAM
ccugacuccauuuccuuccc

SEQ ID NO: 24526 - RNA, 20 nt, Artificial Sequence
  spacer sequence CTCN PAM
auuuccuuccccagcuggac

SEQ ID NO: 24527 - RNA, 20 nt, Artificial Sequence
  spacer sequence CTCN PAM
cgguccagcuggggaaggaa

SEQ ID NO: 24528 - RNA, 20 nt, Artificial Sequence
  spacer sequence CTCN PAM
ccagcagcgugacgauacug

SEQ ID NO: 24529 - RNA, 20 nt, Artificial Sequence
  spacer sequence CTCN PAM
gcagaacgccacgguggaag

SEQ ID NO: 24530 - RNA, 20 nt, Artificial Sequence
  spacer sequence CTCN PAM
cccagccggccaccuggcau

SEQ ID NO: 24531 - RNA, 20 nt, Artificial Sequence
  spacer sequence CTCN PAM
cccguuuucccagguuuguc

SEQ ID NO: 24532 - RNA, 20 nt, Artificial Sequence
  spacer sequence CTCN PAM
cguuuucccagguuugucaa

SEQ ID NO: 24533 - RNA, 20 nt, Artificial Sequence
  spacer sequence CTCN PAM
ggggucacagucacguugac

SEQ ID NO: 24534 - RNA, 20 nt, Artificial Sequence
  spacer sequence CTCN PAM
cccgccgcgguggcaucugc

SEQ ID NO: 24535 - RNA, 20 nt, Artificial Sequence
  spacer sequence CTCN PAM
ucugcgagggccuggcccac

SEQ ID NO: 24536 - RNA, 20 nt, Artificial Sequence
  spacer sequence CTCN PAM
cagacgaggggggugccccc

SEQ ID NO: 24537 - RNA, 20 nt, Artificial Sequence
  spacer sequence CTCN PAM
ggugaagaagucagggccuc

SEQ ID NO: 24538 - RNA, 20 nt, Artificial Sequence
  spacer sequence CTCN PAM
uccgagacuggaucgauggu

SEQ ID NO: 24539 - RNA, 20 nt, Artificial Sequence
  spacer sequence CTCN PAM
gaagagcgccacucggguga

SEQ ID NO: 24540 - RNA, 20 nt, Artificial Sequence
  spacer sequence CTCN PAM
acaacccgggaccggggcca

SEQ ID NO: 24541 - RNA, 20 nt, Artificial Sequence
  spacer sequence CTCN PAM
cggugccuccgcgccguggu

SEQ ID NO: 24542 - RNA, 20 nt, Artificial Sequence
  spacer sequence CTCN PAM
gcgccguggucgggucacag

SEQ ID NO: 24543 - RNA, 20 nt, Artificial Sequence
  spacer sequence CTCN PAM
ugaauagcugggauuacagg

SEQ ID NO: 24544 - RNA, 20 nt, Artificial Sequence
  spacer sequence CTCN PAM
gccuccugaauagcugggau

SEQ ID NO: 24545 - RNA, 20 nt, Artificial Sequence
  spacer sequence CTCN PAM
ugccucagccuccugaauag

SEQ ID NO: 24546 - RNA, 20 nt, Artificial Sequence
  spacer sequence CTCN PAM
uggguacaagcgauucuccu

SEQ ID NO: 24547 - RNA, 20 nt, Artificial Sequence
  spacer sequence CTCN PAM
gccuccuggguacaagcgau

SEQ ID NO: 24548 - RNA, 20 nt, Artificial Sequence
  spacer sequence CTCN PAM
cugcaagcuccgccuccugg

SEQ ID NO: 24549 - RNA, 20 nt, Artificial Sequence
  spacer sequence CTCN PAM
acuacuuucuuuuucuuucu

SEQ ID NO: 24550 - RNA, 20 nt, Artificial Sequence
  spacer sequence CTCN PAM
ucuacuacuuucuuuuucuu

SEQ ID NO: 24551 - RNA, 20 nt, Artificial Sequence
  spacer sequence CTCN PAM
ccucuacuacuuucuuuuuc

SEQ ID NO: 24552 - RNA, 20 nt, Artificial Sequence
  spacer sequence CTCN PAM
uuuuucucuccucuacuacu

SEQ ID NO: 24553 - RNA, 20 nt, Artificial Sequence
  spacer sequence CTCN PAM
cuuuuuucucuccucuacua

SEQ ID NO: 24554 - RNA, 20 nt, Artificial Sequence
  spacer sequence CTCN PAM
aucuuucuuguucucucuuu

SEQ ID NO: 24555 - RNA, 20 nt, Artificial Sequence
  spacer sequence CTCN PAM
ccaucuuucuuguucucucu

SEQ ID NO: 24556 - RNA, 20 nt, Artificial Sequence
  spacer sequence CTCN PAM
gucucuccaucuuucuuguu

SEQ ID NO: 24557 - RNA, 20 nt, Artificial Sequence
  spacer sequence CTCN PAM
guccgucucugucucuccau

SEQ ID NO: 24558 - RNA, 20 nt, Artificial Sequence
  spacer sequence CTCN PAM
gugucucuguccgucucugu

SEQ ID NO: 24559 - RNA, 20 nt, Artificial Sequence
  spacer sequence CTCN PAM
gucucugugucucuguccgu

SEQ ID NO: 24560 - RNA, 20 nt, Artificial Sequence
  spacer sequence CTCN PAM
cugucucugugucucugucc

SEQ ID NO: 24561 - RNA, 20 nt, Artificial Sequence
  spacer sequence CTCN PAM
cucugucucugugucucugu

SEQ ID NO: 24562 - RNA, 20 nt, Artificial Sequence
  spacer sequence CTCN PAM
ggcucugucccucuuuuucc

SEQ ID NO: 24563 - RNA, 20 nt, Artificial Sequence
  spacer sequence CTCN PAM
cuggcucugucccucuuuuu

SEQ ID NO: 24564 - RNA, 20 nt, Artificial Sequence
  spacer sequence CTCN PAM
gucucucuggcucugucccu

SEQ ID NO: 24565 - RNA, 20 nt, Artificial Sequence
  spacer sequence CTCN PAM
cagucucucuggcucugucc

SEQ ID NO: 24566 - RNA, 20 nt, Artificial Sequence
  spacer sequence CTCN PAM
cucagucucucuggcucugu

SEQ ID NO: 24567 - RNA, 20 nt, Artificial Sequence
  spacer sequence CTCN PAM
cuuuuuuaaaacuaucucuc

SEQ ID NO: 24568 - RNA, 20 nt, Artificial Sequence
  spacer sequence CTCN PAM
gugucaucgcugucucccuu

SEQ ID NO: 24569 - RNA, 20 nt, Artificial Sequence
  spacer sequence CTCN PAM
cugugucaucgcugucuccc

SEQ ID NO: 24570 - RNA, 20 nt, Artificial Sequence
  spacer sequence CTCN PAM
gugucugugucugugucucu

SEQ ID NO: 24571 - RNA, 20 nt, Artificial Sequence
  spacer sequence CTCN PAM
ucaucucugugucugugucu

SEQ ID NO: 24572 - RNA, 20 nt, Artificial Sequence
  spacer sequence CTCN PAM
cuauaucugucugucucuuc

SEQ ID NO: 24573 - RNA, 20 nt, Artificial Sequence
  spacer sequence CTCN PAM
gucucccuauaucugucugu

SEQ ID NO: 24574 - RNA, 20 nt, Artificial Sequence
  spacer sequence CTCN PAM
gucugucucugucucccuau

SEQ ID NO: 24575 - RNA, 20 nt, Artificial Sequence
  spacer sequence CTCN PAM
gucucagucugucucugucu

SEQ ID NO: 24576 - RNA, 20 nt, Artificial Sequence
  spacer sequence CTCN PAM
cugucucagucugucucugu

SEQ ID NO: 24577 - RNA, 20 nt, Artificial Sequence
  spacer sequence CTCN PAM
gucucucugucucagucugu

SEQ ID NO: 24578 - RNA, 20 nt, Artificial Sequence
  spacer sequence CTCN PAM
gucucugucucucugucuca

SEQ ID NO: 24579 - RNA, 20 nt, Artificial Sequence
  spacer sequence CTCN PAM
cucugucucugucucucugu

SEQ ID NO: 24580 - RNA, 20 nt, Artificial Sequence
  spacer sequence CTCN PAM
gucucccucugucucugucu

SEQ ID NO: 24581 - RNA, 20 nt, Artificial Sequence
  spacer sequence CTCN PAM
gucucugucucccucugucu

SEQ ID NO: 24582 - RNA, 20 nt, Artificial Sequence
  spacer sequence CTCN PAM
gucucugucucugucucccu

SEQ ID NO: 24583 - RNA, 20 nt, Artificial Sequence
  spacer sequence CTCN PAM
uucucugucucugucucugu

SEQ ID NO: 24584 - RNA, 20 nt, Artificial Sequence
  spacer sequence CTCN PAM
uucugucuccuucucugucu

SEQ ID NO: 24585 - RNA, 20 nt, Artificial Sequence
  spacer sequence CTCN PAM
ccgcccucuuucugucuccu

SEQ ID NO: 24586 - RNA, 20 nt, Artificial Sequence
  spacer sequence CTCN PAM
ccccgcccucuuucugucuc

SEQ ID NO: 24587 - RNA, 20 nt, Artificial Sequence
  spacer sequence CTCN PAM
cuccccgcccucuuucuguc

SEQ ID NO: 24588 - RNA, 20 nt, Artificial Sequence
  spacer sequence CTCN PAM
gcccccaggccgaccccugc

SEQ ID NO: 24589 - RNA, 20 nt, Artificial Sequence
  spacer sequence CTCN PAM
caccuguguucccagcacuu

SEQ ID NO: 24590 - RNA, 20 nt, Artificial Sequence
  spacer sequence CTCN PAM
ggugacccgcccguaauccc

SEQ ID NO: 24591 - RNA, 20 nt, Artificial Sequence
  spacer sequence CTCN PAM
ugaccucaggugacccgccc

SEQ ID NO: 24592 - RNA, 20 nt, Artificial Sequence
  spacer sequence CTCN PAM
aacuccugaccucaggugac

SEQ ID NO: 24593 - RNA, 20 nt, Artificial Sequence
  spacer sequence CTCN PAM
aaguucauucagugcuucuc

SEQ ID NO: 24594 - RNA, 20 nt, Artificial Sequence
  spacer sequence CTCN PAM
ccauuucacuguagguuuaa

SEQ ID NO: 24595 - RNA, 20 nt, Artificial Sequence
  spacer sequence CTCN PAM
auuucacuguagguuuaaac

SEQ ID NO: 24596 - RNA, 20 nt, Artificial Sequence
  spacer sequence CTCN PAM
gcggcggggccauccugggc

SEQ ID NO: 24597 - RNA, 20 nt, Artificial Sequence
  spacer sequence CTCN PAM
uggcagggcccugcagugcc

SEQ ID NO: 24598 - RNA, 20 nt, Artificial Sequence
  spacer sequence CTCN PAM
cuccaagucgugacaaccac

SEQ ID NO: 24599 - RNA, 20 nt, Artificial Sequence
  spacer sequence CTCN PAM
aagucgugacaaccacggau

SEQ ID NO: 24600 - RNA, 20 nt, Artificial Sequence
  spacer sequence CTCN PAM
aggccucacacagggacccc

SEQ ID NO: 24601 - RNA, 20 nt, Artificial Sequence
  spacer sequence CTCN PAM
cacagggaccccugggggca

SEQ ID NO: 24602 - RNA, 20 nt, Artificial Sequence
  spacer sequence CTCN PAM
aacccuggggugauucugcc

SEQ ID NO: 24603 - RNA, 20 nt, Artificial Sequence
  spacer sequence CTCN PAM
uggggucuguggaauccucu

SEQ ID NO: 24604 - RNA, 20 nt, Artificial Sequence
  spacer sequence CTCN PAM
gagucccaugauccucugcc

SEQ ID NO: 24605 - RNA, 20 nt, Artificial Sequence
  spacer sequence CTCN PAM
ugggaccucagcagggcaga

SEQ ID NO: 24606 - RNA, 20 nt, Artificial Sequence
  spacer sequence CTCN PAM
ggguguggauuucaaugugu

SEQ ID NO: 24607 - RNA, 20 nt, Artificial Sequence
  spacer sequence CTCN PAM
cacucaggguguggauuuca

SEQ ID NO: 24608 - RNA, 20 nt, Artificial Sequence
  spacer sequence CTCN PAM
cucccacucaggguguggau

SEQ ID NO: 24609 - RNA, 20 nt, Artificial Sequence
  spacer sequence CTCN PAM
cccucccacucagggugugg

SEQ ID NO: 24610 - RNA, 20 nt, Artificial Sequence
  spacer sequence CTCN PAM
cucccucccacucagggugu

SEQ ID NO: 24611 - RNA, 20 nt, Artificial Sequence
  spacer sequence CTCN PAM
ucucucccucccacucaggg

SEQ ID NO: 24612 - RNA, 20 nt, Artificial Sequence
  spacer sequence CTCN PAM
ccuccucucucccucccacu

SEQ ID NO: 24613 - RNA, 20 nt, Artificial Sequence
  spacer sequence CTCN PAM
cgggacucgccuccucucuc

SEQ ID NO: 24614 - RNA, 20 nt, Artificial Sequence
  spacer sequence CTCN PAM
caggcucccaaggcaaaagg

SEQ ID NO: 24615 - RNA, 20 nt, Artificial Sequence
  spacer sequence CTCN PAM
caaggcaaaaggaggaagug

SEQ ID NO: 24616 - RNA, 20 nt, Artificial Sequence
  spacer sequence CTCN PAM
uuuugccuugggagccuggg

SEQ ID NO: 24617 - RNA, 20 nt, Artificial Sequence
  spacer sequence CTCN PAM
acggccucuggcauugggcu

SEQ ID NO: 24618 - RNA, 20 nt, Artificial Sequence
  spacer sequence CTCN PAM
ggcauugggcuauaagagga

SEQ ID NO: 24619 - RNA, 20 nt, Artificial Sequence
  spacer sequence CTCN PAM
uauagcccaaugccagaggc

SEQ ID NO: 24620 - RNA, 20 nt, Artificial Sequence
  spacer sequence CTCN PAM
ucuuauagcccaaugccaga

SEQ ID NO: 24621 - RNA, 20 nt, Artificial Sequence
  spacer sequence CTCN PAM
ccggccccccagcccugccc

SEQ ID NO: 24622 - RNA, 20 nt, Artificial Sequence
  spacer sequence CTCN PAM
gcagcaaggccagcagcacg

SEQ ID NO: 24623 - RNA, 20 nt, Artificial Sequence
  spacer sequence CTCN PAM
ccgcucagcagcaaggccag

SEQ ID NO: 24624 - RNA, 20 nt, Artificial Sequence
  spacer sequence CTCN PAM
cucaccgcucagcagcaagg

SEQ ID NO: 24625 - RNA, 20 nt, Artificial Sequence
  spacer sequence CTCN PAM
aggccccgguggauuguggg

SEQ ID NO: 24626 - RNA, 20 nt, Artificial Sequence
  spacer sequence CTCN PAM
ugguggauauuuccccacaa

SEQ ID NO: 24627 - RNA, 20 nt, Artificial Sequence
  spacer sequence CTCN PAM
guuuccccagcugugccaga

SEQ ID NO: 24628 - RNA, 20 nt, Artificial Sequence
  spacer sequence CTCN PAM
ccugacccugccucaguuuc

SEQ ID NO: 24629 - RNA, 20 nt, Artificial Sequence
  spacer sequence CTCN PAM
acucacugcucgggaccaac

SEQ ID NO: 24630 - RNA, 20 nt, Artificial Sequence
  spacer sequence CTCN PAM
cugcucgggaccaacgcuug

SEQ ID NO: 24631 - RNA, 20 nt, Artificial Sequence
  spacer sequence CTCN PAM
ucuuccccugauuccagcau

SEQ ID NO: 24632 - RNA, 20 nt, Artificial Sequence
  spacer sequence CTCN PAM
cuucuuccccugauuccagc

SEQ ID NO: 24633 - RNA, 20 nt, Artificial Sequence
  spacer sequence CTCN PAM
ggucccuauccugaggguga

SEQ ID NO: 24634 - RNA, 20 nt, Artificial Sequence
  spacer sequence CTCN PAM
ggauagggaccugagggggc

SEQ ID NO: 24635 - RNA, 20 nt, Artificial Sequence
  spacer sequence CTCN PAM
aaaaaaaaaaaaagaaaaag

SEQ ID NO: 24636 - RNA, 20 nt, Artificial Sequence
  spacer sequence CTCN PAM
gucucaaaaaaaaaaaaaag

SEQ ID NO: 24637 - RNA, 20 nt, Artificial Sequence
  spacer sequence CTCN PAM
cccugucgcccaggcuggag

SEQ ID NO: 24638 - RNA, 20 nt, Artificial Sequence
  spacer sequence CTCN PAM
agccugggcgacagggcgag

SEQ ID NO: 24639 - RNA, 20 nt, Artificial Sequence
  spacer sequence CTCN PAM
gcucacugcaagcucagccu

SEQ ID NO: 24640 - RNA, 20 nt, Artificial Sequence
  spacer sequence CTCN PAM
cugcaagcucagccucccgg

SEQ ID NO: 24641 - RNA, 20 nt, Artificial Sequence
  spacer sequence CTCN PAM
gccucccggguucacgccuu

SEQ ID NO: 24642 - RNA, 20 nt, Artificial Sequence
  spacer sequence CTCN PAM
cggguucacgccuuucuccu

SEQ ID NO: 24643 - RNA, 20 nt, Artificial Sequence
  spacer sequence CTCN PAM
ugccucagccucccgaguag

SEQ ID NO: 24644 - RNA, 20 nt, Artificial Sequence
  spacer sequence CTCN PAM
gccucccgaguagcugggac

SEQ ID NO: 24645 - RNA, 20 nt, Artificial Sequence
  spacer sequence CTCN PAM
cgaguagcugggacuacagg

SEQ ID NO: 24646 - RNA, 20 nt, Artificial Sequence
  spacer sequence CTCN PAM
ggaggcugaggcaggagaaa

SEQ ID NO: 24647 - RNA, 20 nt, Artificial Sequence
  spacer sequence CTCN PAM
acaaaaauuacaaaaaauua

SEQ ID NO: 24648 - RNA, 20 nt, Artificial Sequence
  spacer sequence CTCN PAM
aucuccugacuucgugaucc

SEQ ID NO: 24649 - RNA, 20 nt, Artificial Sequence
  spacer sequence CTCN PAM
ugacuucgugauccgccugc

SEQ ID NO: 24650 - RNA, 20 nt, Artificial Sequence
  spacer sequence CTCN PAM
cugacgccuggacucccccc

SEQ ID NO: 24651 - RNA, 20 nt, Artificial Sequence
  spacer sequence CTCN PAM
cccccugcaggugcugcccg

SEQ ID NO: 24652 - RNA, 20 nt, Artificial Sequence
  spacer sequence CTCN PAM
ggcagcaccugcaggggggg

SEQ ID NO: 24653 - RNA, 20 nt, Artificial Sequence
  spacer sequence CTCN PAM
gcagcucgggcagcaccugc

SEQ ID NO: 24654 - RNA, 20 nt, Artificial Sequence
  spacer sequence CTCN PAM
cugcagaugcgggggaaccc

SEQ ID NO: 24655 - RNA, 20 nt, Artificial Sequence
  spacer sequence CTCN PAM
gcagaaguggcugcccgggu

SEQ ID NO: 24656 - RNA, 20 nt, Artificial Sequence
  spacer sequence CTCN PAM
caugucccgcaggcagugcg

SEQ ID NO: 24657 - RNA, 20 nt, Artificial Sequence
  spacer sequence CTCN PAM
acaccccuguccgcccgccc

SEQ ID NO: 24658 - RNA, 20 nt, Artificial Sequence
  spacer sequence CTCN PAM
gagcaccacguucaccaggc

SEQ ID NO: 24659 - RNA, 20 nt, Artificial Sequence
  spacer sequence CTCN PAM
ugcguccgcacguugugggc

SEQ ID NO: 24660 - RNA, 20 nt, Artificial Sequence
  spacer sequence CTCN PAM
guggcucagguguuucugaa

SEQ ID NO: 24661 - RNA, 20 nt, Artificial Sequence
  spacer sequence CTCN PAM
gguguuucugaacaacuacg

SEQ ID NO: 24662 - RNA, 20 nt, Artificial Sequence
  spacer sequence CTCN PAM
gcgucguaguuguucagaaa

SEQ ID NO: 24663 - RNA, 20 nt, Artificial Sequence
  spacer sequence CTCN PAM
ucauccaggugggcgggcag

SEQ ID NO: 24664 - RNA, 20 nt, Artificial Sequence
  spacer sequence CTCN PAM
uccaggugggcgggcagggc

SEQ ID NO: 24665 - RNA, 20 nt, Artificial Sequence
  spacer sequence CTCN PAM
cggcccugcccgcccaccug

SEQ ID NO: 24666 - RNA, 20 nt, Artificial Sequence
  spacer sequence CTCN PAM
gaggggcacggccagagggc

SEQ ID NO: 24667 - RNA, 20 nt, Artificial Sequence
  spacer sequence CTCN PAM
gagcccucgcggcccugccc

SEQ ID NO: 24668 - RNA, 20 nt, Artificial Sequence
  spacer sequence CTCN PAM
guaagugcuuggggcugggc

SEQ ID NO: 24669 - RNA, 20 nt, Artificial Sequence
  spacer sequence CTCN PAM
cgccuguacucccaguacuu

SEQ ID NO: 24670 - RNA, 20 nt, Artificial Sequence
  spacer sequence CTCN PAM
caguacuuugggaggcuggg

SEQ ID NO: 24671 - RNA, 20 nt, Artificial Sequence
  spacer sequence CTCN PAM
caaaguacugggaguacagg

SEQ ID NO: 24672 - RNA, 20 nt, Artificial Sequence
  spacer sequence CTCN PAM
caucccagccucccaaagua

SEQ ID NO: 24673 - RNA, 20 nt, Artificial Sequence
  spacer sequence CTCN PAM
agugauccucccaucccagc

SEQ ID NO: 24674 - RNA, 20 nt, Artificial Sequence
  spacer sequence CTCN PAM
uggccucaagugauccuccc

SEQ ID NO: 24675 - RNA, 20 nt, Artificial Sequence
  spacer sequence CTCN PAM
caaacuccuggccucaagug

SEQ ID NO: 24676 - RNA, 20 nt, Artificial Sequence
  spacer sequence CTCN PAM
cuagguuggucaggcugcuc

SEQ ID NO: 24677 - RNA, 20 nt, Artificial Sequence
  spacer sequence CTCN PAM
auaaaagacauuuuuuuuuu

SEQ ID NO: 24678 - RNA, 20 nt, Artificial Sequence
  spacer sequence CTCN PAM
ugccucagccuccugaguag

SEQ ID NO: 24679 - RNA, 20 nt, Artificial Sequence
  spacer sequence CTCN PAM
gccuccugaguagcugggau

SEQ ID NO: 24680 - RNA, 20 nt, Artificial Sequence
  spacer sequence CTCN PAM
ugaguagcugggauuacagg

SEQ ID NO: 24681 - RNA, 20 nt, Artificial Sequence
  spacer sequence CTCN PAM
ggaggcugaggcaggagaau

SEQ ID NO: 24682 - RNA, 20 nt, Artificial Sequence
  spacer sequence CTCN PAM
acuaaaaauacaaaaauuag

SEQ ID NO: 24683 - RNA, 20 nt, Artificial Sequence
  spacer sequence CTCN PAM
aacuccugaccucaagugau

SEQ ID NO: 24684 - RNA, 20 nt, Artificial Sequence
  spacer sequence CTCN PAM
ugaccucaagugaucugcuc

SEQ ID NO: 24685 - RNA, 20 nt, Artificial Sequence
  spacer sequence CTCN PAM
agugaucugcucuccucagc

SEQ ID NO: 24686 - RNA, 20 nt, Artificial Sequence
  spacer sequence CTCN PAM
ccucagccucccaaagugcu

SEQ ID NO: 24687 - RNA, 20 nt, Artificial Sequence
  spacer sequence CTCN PAM
ucagccucccaaagugcugg

SEQ ID NO: 24688 - RNA, 20 nt, Artificial Sequence
  spacer sequence CTCN PAM
gccucccaaagugcugggau

SEQ ID NO: 24689 - RNA, 20 nt, Artificial Sequence
  spacer sequence CTCN PAM
caaagugcugggauuauagg

SEQ ID NO: 24690 - RNA, 20 nt, Artificial Sequence
  spacer sequence CTCN PAM
ccgccgccugccuucugccc

SEQ ID NO: 24691 - RNA, 20 nt, Artificial Sequence
  spacer sequence CTCN PAM
gcuggggcagaaggcaggcg

SEQ ID NO: 24692 - RNA, 20 nt, Artificial Sequence
  spacer sequence CTCN PAM
gugccuccgucgccacaguc

SEQ ID NO: 24693 - RNA, 20 nt, Artificial Sequence
  spacer sequence CTCN PAM
gucgccacaguccagcugcc

SEQ ID NO: 24694 - RNA, 20 nt, Artificial Sequence
  spacer sequence CTCN PAM
ugcaggaccugggcuggggg

SEQ ID NO: 24695 - RNA, 20 nt, Artificial Sequence
  spacer sequence CTCN PAM
augucaccguggucaccuuc

SEQ ID NO: 24696 - RNA, 20 nt, Artificial Sequence
  spacer sequence CTCN PAM
ccgcaaggccggcaucugcu

SEQ ID NO: 24697 - RNA, 20 nt, Artificial Sequence
  spacer sequence CTCN PAM
gccccucccugcucacacuu

SEQ ID NO: 24698 - RNA, 20 nt, Artificial Sequence
  spacer sequence CTCN PAM
cugcucacacuuuuuguuug

SEQ ID NO: 24699 - RNA, 20 nt, Artificial Sequence
  spacer sequence CTCN PAM
cacuuuuuguuuguuuuuga

SEQ ID NO: 24700 - RNA, 20 nt, Artificial Sequence
  spacer sequence CTCN PAM
aaaacaaacaaaaaguguga

SEQ ID NO: 24701 - RNA, 20 nt, Artificial Sequence
  spacer sequence CTCN PAM
gucucaaaaacaaacaaaaa

SEQ ID NO: 24702 - RNA, 20 nt, Artificial Sequence
  spacer sequence CTCN PAM
guuguccaggcuggagugca

SEQ ID NO: 24703 - RNA, 20 nt, Artificial Sequence
  spacer sequence CTCN PAM
agccuggacaacagagcgac

SEQ ID NO: 24704 - RNA, 20 nt, Artificial Sequence
  spacer sequence CTCN PAM
agagaaagacagccagcuac

SEQ ID NO: 24705 - RNA, 20 nt, Artificial Sequence
  spacer sequence CTCN PAM
agacagggucucgcucuguu

SEQ ID NO: 24706 - RNA, 20 nt, Artificial Sequence
  spacer sequence CTCN PAM
cgagacagggucucgcucug

SEQ ID NO: 24707 - RNA, 20 nt, Artificial Sequence
  spacer sequence CTCN PAM
ggaggccgaggcaggagaau

SEQ ID NO: 24708 - RNA, 20 nt, Artificial Sequence
  spacer sequence CTCN PAM
cgaguagcuggcugucuuuc

SEQ ID NO: 24709 - RNA, 20 nt, Artificial Sequence
  spacer sequence CTCN PAM
gccucccgaguagcuggcug

SEQ ID NO: 24710 - RNA, 20 nt, Artificial Sequence
  spacer sequence CTCN PAM
ugccucggccucccgaguag

SEQ ID NO: 24711 - RNA, 20 nt, Artificial Sequence
  spacer sequence CTCN PAM
cggguucaagugauucuccu

SEQ ID NO: 24712 - RNA, 20 nt, Artificial Sequence
  spacer sequence CTCN PAM
gccucccggguucaagugau

SEQ ID NO: 24713 - RNA, 20 nt, Artificial Sequence
  spacer sequence CTCN PAM
cugcaaccucugccucccgg

SEQ ID NO: 24714 - RNA, 20 nt, Artificial Sequence
  spacer sequence CTCN PAM
agggagacucagguggcccc

SEQ ID NO: 24715 - RNA, 20 nt, Artificial Sequence
  spacer sequence CTCN PAM
cuggaggacagggacggcca

SEQ ID NO: 24716 - RNA, 20 nt, Artificial Sequence
  spacer sequence CTCN PAM
gguggcccccugaucuguga

SEQ ID NO: 24717 - RNA, 20 nt, Artificial Sequence
  spacer sequence CTCN PAM
uucgugaucuggggaugugc

SEQ ID NO: 24718 - RNA, 20 nt, Artificial Sequence
  spacer sequence CTCN PAM
acguggacuggauccguucc

SEQ ID NO: 24719 - RNA, 20 nt, Artificial Sequence
  spacer sequence CTCN PAM
acacggcgcagcguggaacg

SEQ ID NO: 24720 - RNA, 20 nt, Artificial Sequence
  spacer sequence CTCN PAM
uugcugguguuuuuuuuuuc

SEQ ID NO: 24721 - RNA, 20 nt, Artificial Sequence
  spacer sequence CTCN PAM
aaaaaauauuaaaaagaaaa

SEQ ID NO: 24722 - RNA, 20 nt, Artificial Sequence
  spacer sequence CTCN PAM
gucucaaaaaaauauuaaaa

SEQ ID NO: 24723 - RNA, 20 nt, Artificial Sequence
  spacer sequence CTCN PAM
cucugucacccaggcuggag

SEQ ID NO: 24724 - RNA, 20 nt, Artificial Sequence
  spacer sequence CTCN PAM
gucacccaggcuggagugca

SEQ ID NO: 24725 - RNA, 20 nt, Artificial Sequence
  spacer sequence CTCN PAM
agccugggugacagagcgag

SEQ ID NO: 24726 - RNA, 20 nt, Artificial Sequence
  spacer sequence CTCN PAM
aaaauaaauaaguaggccag

SEQ ID NO: 24727 - RNA, 20 nt, Artificial Sequence
  spacer sequence CTCN PAM
cucugucgcccagucuguag

SEQ ID NO: 24728 - RNA, 20 nt, Artificial Sequence
  spacer sequence CTCN PAM
gucgcccagucuguagugca

SEQ ID NO: 24729 - RNA, 20 nt, Artificial Sequence
  spacer sequence CTCN PAM
acaaaaacuaagaaaauagc

SEQ ID NO: 24730 - RNA, 20 nt, Artificial Sequence
  spacer sequence CTCN PAM
gugacucuuuacauaugaac

SEQ ID NO: 24731 - RNA, 20 nt, Artificial Sequence
  spacer sequence CTCN PAM
uuacauaugaacaccuccag

SEQ ID NO: 24732 - RNA, 20 nt, Artificial Sequence
  spacer sequence CTCN PAM
guaaaauuauaaucguagga

SEQ ID NO: 24733 - RNA, 20 nt, Artificial Sequence
  spacer sequence CTCN PAM
ucuguaaaauuauaaucgua

SEQ ID NO: 24734 - RNA, 20 nt, Artificial Sequence
  spacer sequence CTCN PAM
guuuccuccucuguaaaauu

SEQ ID NO: 24735 - RNA, 20 nt, Artificial Sequence
  spacer sequence CTCN PAM
gugacucaguuuccuccucu

SEQ ID NO: 24736 - RNA, 20 nt, Artificial Sequence
  spacer sequence CTCN PAM
ccgugacucaguuuccuccu

SEQ ID NO: 24737 - RNA, 20 nt, Artificial Sequence
  spacer sequence CTCN PAM
gcuuaaucagacacacacua

SEQ ID NO: 24738 - RNA, 20 nt, Artificial Sequence
  spacer sequence CTCN PAM
guccaugucugcccuguccu

SEQ ID NO: 24739 - RNA, 20 nt, Artificial Sequence
  spacer sequence CTCN PAM
gggagggcagggccauuguc

SEQ ID NO: 24740 - RNA, 20 nt, Artificial Sequence
  spacer sequence CTCN PAM
cagagccuggcacacagcag

SEQ ID NO: 24741 - RNA, 20 nt, Artificial Sequence
  spacer sequence CTCN PAM
ccccgccuauuccuggagac

SEQ ID NO: 24742 - RNA, 20 nt, Artificial Sequence
  spacer sequence CTCN PAM
aggaauaggcggggcgaggg

SEQ ID NO: 24743 - RNA, 20 nt, Artificial Sequence
  spacer sequence CTCN PAM
ccuuguccuggagccaggag

SEQ ID NO: 24744 - RNA, 20 nt, Artificial Sequence
  spacer sequence CTCN PAM
aggacaaggggaggggaagg

SEQ ID NO: 24745 - RNA, 20 nt, Artificial Sequence
  spacer sequence CTCN PAM
uggcuccaggacaaggggag

SEQ ID NO: 24746 - RNA, 20 nt, Artificial Sequence
  spacer sequence CTCN PAM
guuuacccagggcccuguga

SEQ ID NO: 24747 - RNA, 20 nt, Artificial Sequence
  spacer sequence CTCN PAM
cgccugugaucccagcacuc

SEQ ID NO: 24748 - RNA, 20 nt, Artificial Sequence
  spacer sequence CTCN PAM
gggaggcugaggcaggcgga

SEQ ID NO: 24749 - RNA, 20 nt, Artificial Sequence
  spacer sequence CTCN PAM
cagagugcugggaucacagg

SEQ ID NO: 24750 - RNA, 20 nt, Artificial Sequence
  spacer sequence CTCN PAM
gccucccagagugcugggau

SEQ ID NO: 24751 - RNA, 20 nt, Artificial Sequence
  spacer sequence CTCN PAM
ggugauccgccugccucagc

SEQ ID NO: 24752 - RNA, 20 nt, Artificial Sequence
  spacer sequence CTCN PAM
gccucccagguucaagugau

SEQ ID NO: 24753 - RNA, 20 nt, Artificial Sequence
  spacer sequence CTCN PAM
cggcaaccuccgccucccag

SEQ ID NO: 24754 - RNA, 20 nt, Artificial Sequence
  spacer sequence CTCN PAM
agccugggcgauagagcaag

SEQ ID NO: 24755 - RNA, 20 nt, Artificial Sequence
  spacer sequence CTCN PAM
aucgcccaggcuggagugcg

SEQ ID NO: 24756 - RNA, 20 nt, Artificial Sequence
  spacer sequence CTCN PAM
gucuccaaaaaaauaaauua

SEQ ID NO: 24757 - RNA, 20 nt, Artificial Sequence
  spacer sequence CTCN PAM
aaaaaaauaaauuaaaaaac

SEQ ID NO: 24758 - RNA, 20 nt, Artificial Sequence
  spacer sequence CTCN PAM
ccuggcacagggcguugaug

SEQ ID NO: 24759 - RNA, 20 nt, Artificial Sequence
  spacer sequence CTCN PAM
ccccuggcacagggcguuga

SEQ ID NO: 24760 - RNA, 20 nt, Artificial Sequence
  spacer sequence CTCN PAM
acuuccucuccccuggcaca

SEQ ID NO: 24761 - RNA, 20 nt, Artificial Sequence
  spacer sequence CTCN PAM
cagcacagggcuauaagagg

SEQ ID NO: 24762 - RNA, 20 nt, Artificial Sequence
  spacer sequence CTCN PAM
uauagcccugugcugggagg

SEQ ID NO: 24763 - RNA, 20 nt, Artificial Sequence
  spacer sequence CTCN PAM
ucuuauagcccugugcuggg

SEQ ID NO: 24764 - RNA, 20 nt, Artificial Sequence
  spacer sequence CTCN PAM
gugcccgcccggcuccucuu

SEQ ID NO: 24765 - RNA, 20 nt, Artificial Sequence
  spacer sequence CTCN PAM
gccccuccgugcccgcccgg

SEQ ID NO: 24766 - RNA, 20 nt, Artificial Sequence
  spacer sequence CTCN PAM
ggggucucugccccuccgug

SEQ ID NO: 24767 - RNA, 20 nt, Artificial Sequence
  spacer sequence CTCN PAM
gccgccgacucgcgugucuu

SEQ ID NO: 24768 - RNA, 20 nt, Artificial Sequence
  spacer sequence CTCN PAM
cgugucuuuuccucgccugu

SEQ ID NO: 24769 - RNA, 20 nt, Artificial Sequence
  spacer sequence CTCN PAM
ccuguguccugccggccuug

SEQ ID NO: 24770 - RNA, 20 nt, Artificial Sequence
  spacer sequence CTCN PAM
ccccccagcagcaaggccgg

SEQ ID NO: 24771 - RNA, 20 nt, Artificial Sequence
  spacer sequence CTCN PAM
aaaacucaccccccagcagc

SEQ ID NO: 24772 - RNA, 20 nt, Artificial Sequence
  spacer sequence CTCN PAM
gagauuguggggggccggcg

SEQ ID NO: 24773 - RNA, 20 nt, Artificial Sequence
  spacer sequence CTCN PAM
gaggccagcgcggugccugg

SEQ ID NO: 24774 - RNA, 20 nt, Artificial Sequence
  spacer sequence CTCN PAM
ccggccccccacaaucuccg

SEQ ID NO: 24775 - RNA, 20 nt, Artificial Sequence
  spacer sequence CTCN PAM
gcgcagcugcagggacacca

SEQ ID NO: 24776 - RNA, 20 nt, Artificial Sequence
  spacer sequence CTCN PAM
cacauucgccacgcagugcg

SEQ ID NO: 24777 - RNA, 20 nt, Artificial Sequence
  spacer sequence CTCN PAM
cggcuacucacacauucgcc

SEQ ID NO: 24778 - RNA, 20 nt, Artificial Sequence
  spacer sequence CTCN PAM
gaccccgcgucccggucugu

SEQ ID NO: 24779 - RNA, 20 nt, Artificial Sequence
  spacer sequence CTCN PAM
caggaccacccgcaccgcgc

SEQ ID NO: 24780 - RNA, 20 nt, Artificial Sequence
  spacer sequence CTCN PAM
cgcggcgggagcccacccgg

SEQ ID NO: 24781 - RNA, 20 nt, Artificial Sequence
  spacer sequence CTCN PAM
cggcgggagcccacccggca

SEQ ID NO: 24782 - RNA, 20 nt, Artificial Sequence
  spacer sequence CTCN PAM
cgccgcgagagguuaugggc

SEQ ID NO: 24783 - RNA, 20 nt, Artificial Sequence
  spacer sequence CTCN PAM
acgacaucgugauucuccag

SEQ ID NO: 24784 - RNA, 20 nt, Artificial Sequence
  spacer sequence CTCN PAM
aggugccgccgggcggggcg

SEQ ID NO: 24785 - RNA, 20 nt, Artificial Sequence
  spacer sequence CTCN PAM
gccccugcgccccccgcccc

SEQ ID NO: 24786 - RNA, 20 nt, Artificial Sequence
  spacer sequence CTCN PAM
guaaguuuguugauugacag

SEQ ID NO: 24787 - RNA, 20 nt, Artificial Sequence
  spacer sequence CTCN PAM
cuucucaguaaguuuguuga

SEQ ID NO: 24788 - RNA, 20 nt, Artificial Sequence
  spacer sequence CTCN PAM
guaaguuuguugauugacaa

SEQ ID NO: 24789 - RNA, 20 nt, Artificial Sequence
  spacer sequence CTCN PAM
cuucucaguaaguuuguuga

SEQ ID NO: 24790 - RNA, 20 nt, Artificial Sequence
  spacer sequence CTCN PAM
guaaguuuguugauugacaa

SEQ ID NO: 24791 - RNA, 20 nt, Artificial Sequence
  spacer sequence CTCN PAM
guaaguuuguugauugacaa

SEQ ID NO: 24792 - RNA, 20 nt, Artificial Sequence
  spacer sequence CTCN PAM
cuucucaguaaguuuguuga

SEQ ID NO: 24793 - RNA, 20 nt, Artificial Sequence
  spacer sequence CTCN PAM
guaaguuuguugauugacag

SEQ ID NO: 24794 - RNA, 20 nt, Artificial Sequence
  spacer sequence CTCN PAM
cuucucaguaaguuuguuga

SEQ ID NO: 24795 - RNA, 20 nt, Artificial Sequence
  spacer sequence CTCN PAM
acgggucggccaccaucaac

SEQ ID NO: 24796 - RNA, 20 nt, Artificial Sequence
  spacer sequence CTCN PAM
gggacgccgccugggcaacg

SEQ ID NO: 24797 - RNA, 20 nt, Artificial Sequence
  spacer sequence CTCN PAM
ugcaggacgcuggcgauccc

SEQ ID NO: 24798 - RNA, 20 nt, Artificial Sequence
  spacer sequence CTCN PAM
acgugacgguggugacgucc

SEQ ID NO: 24799 - RNA, 20 nt, Artificial Sequence
  spacer sequence CTCN PAM
gccgucgcagcaacgucugc

SEQ ID NO: 24800 - RNA, 20 nt, Artificial Sequence
  spacer sequence CTCN PAM
cgugaggggccggcaggccg

SEQ ID NO: 24801 - RNA, 20 nt, Artificial Sequence
  spacer sequence CTCN PAM
ugaggggccggcaggccggc

SEQ ID NO: 24802 - RNA, 20 nt, Artificial Sequence
  spacer sequence CTCN PAM
cgagagugcagacguugcug

SEQ ID NO: 24803 - RNA, 20 nt, Artificial Sequence
  spacer sequence CTCN PAM
gcuccccacccgcucccagc

SEQ ID NO: 24804 - RNA, 20 nt, Artificial Sequence
  spacer sequence CTCN PAM
ccacccgcucccagcccgga

SEQ ID NO: 24805 - RNA, 20 nt, Artificial Sequence
  spacer sequence CTCN PAM
caguccagcuuccccaccuu

SEQ ID NO: 24806 - RNA, 20 nt, Artificial Sequence
  spacer sequence CTCN PAM
acagggggacuccggcagcc

SEQ ID NO: 24807 - RNA, 20 nt, Artificial Sequence
  spacer sequence CTCN PAM
ggcagccccuuggucugcaa

SEQ ID NO: 24808 - RNA, 20 nt, Artificial Sequence
  spacer sequence CTCN PAM
uucguccggggaggcugcgc

SEQ ID NO: 24809 - RNA, 20 nt, Artificial Sequence
  spacer sequence CTCN PAM
ccggacgaaggaggcaauuc

SEQ ID NO: 24810 - RNA, 20 nt, Artificial Sequence
  spacer sequence CTCN PAM
gggcucuaccccgaugccuu

SEQ ID NO: 24811 - RNA, 20 nt, Artificial Sequence
  spacer sequence CTCN PAM
accccgaugccuuugccccg

SEQ ID NO: 24812 - RNA, 20 nt, Artificial Sequence
  spacer sequence CTCN PAM
aucauccaacgcuccgagga

SEQ ID NO: 24813 - RNA, 20 nt, Artificial Sequence
  spacer sequence CTCN PAM
gaggacaaccccugucccca

SEQ ID NO: 24814 - RNA, 20 nt, Artificial Sequence
  spacer sequence CTCN PAM
gagcguuggaugauagaguc

SEQ ID NO: 24815 - RNA, 20 nt, Artificial Sequence
  spacer sequence CTCN PAM
ccagcaucuggcacaauaaa

SEQ ID NO: 24816 - RNA, 20 nt, Artificial Sequence
  spacer sequence CTCN PAM
agcaucuggcacaauaaaca

SEQ ID NO: 24817 - RNA, 20 nt, Artificial Sequence
  spacer sequence CTCN PAM
guuuuguagaauguguuuga

SEQ ID NO: 24818 - RNA, 20 nt, Artificial Sequence
  spacer sequence CTCN PAM
uuggcugugugauugggugu

SEQ ID NO: 24819 - RNA, 20 nt, Artificial Sequence
  spacer sequence CTCN PAM
ggauucuaguuuguuguuua

SEQ ID NO: 24820 - RNA, 20 nt, Artificial Sequence
  spacer sequence CTCN PAM
ugggcaucucuggaguaagc

SEQ ID NO: 24821 - RNA, 20 nt, Artificial Sequence
  spacer sequence CTCN PAM
ggaguaagccaccaccaggg

SEQ ID NO: 24822 - RNA, 20 nt, Artificial Sequence
  spacer sequence CTCN PAM
agagaugcccaagagacucu

SEQ ID NO: 24823 - RNA, 20 nt, Artificial Sequence
  spacer sequence CTCN PAM
auugcccuggcugugcugcc

SEQ ID NO: 24824 - RNA, 20 nt, Artificial Sequence
  spacer sequence CTCN PAM
aucuaaaaacaaaaaagaaa

SEQ ID NO: 24825 - RNA, 20 nt, Artificial Sequence
  spacer sequence CTCN PAM
cucugucgcccaggcuggag

SEQ ID NO: 24826 - RNA, 20 nt, Artificial Sequence
  spacer sequence CTCN PAM
gucgcccaggcuggagugca

SEQ ID NO: 24827 - RNA, 20 nt, Artificial Sequence
  spacer sequence CTCN PAM
agccugggcgacagagcgag

SEQ ID NO: 24828 - RNA, 20 nt, Artificial Sequence
  spacer sequence CTCN PAM
gcucacugcaagcuccgccu

SEQ ID NO: 24829 - RNA, 20 nt, Artificial Sequence
  spacer sequence CTCN PAM
cugcaagcuccgccucccgg

SEQ ID NO: 24830 - RNA, 20 nt, Artificial Sequence
  spacer sequence CTCN PAM
gccucccggguucacgccau

SEQ ID NO: 24831 - RNA, 20 nt, Artificial Sequence
  spacer sequence CTCN PAM
cggguucacgccauucuccu

SEQ ID NO: 24832 - RNA, 20 nt, Artificial Sequence
  spacer sequence CTCN PAM
ugccucagccucccgaguag

SEQ ID NO: 24833 - RNA, 20 nt, Artificial Sequence
  spacer sequence CTCN PAM
gccucccgaguagcugggac

SEQ ID NO: 24834 - RNA, 20 nt, Artificial Sequence
  spacer sequence CTCN PAM
cgaguagcugggacuacagg

SEQ ID NO: 24835 - RNA, 20 nt, Artificial Sequence
  spacer sequence CTCN PAM
ggaggcugaggcaggagaau

SEQ ID NO: 24836 - RNA, 20 nt, Artificial Sequence
  spacer sequence CTCN PAM
uuuuuuguauuuuuaguaga

SEQ ID NO: 24837 - RNA, 20 nt, Artificial Sequence
  spacer sequence CTCN PAM
acuaaaaauacaaaaaauga

SEQ ID NO: 24838 - RNA, 20 nt, Artificial Sequence
  spacer sequence CTCN PAM
aucuccugaacucgugaucc

SEQ ID NO: 24839 - RNA, 20 nt, Artificial Sequence
  spacer sequence CTCN PAM
ugaacucgugauccgcccgc

SEQ ID NO: 24840 - RNA, 20 nt, Artificial Sequence
  spacer sequence CTCN PAM
ugauccgcccgccuugaccu

SEQ ID NO: 24841 - RNA, 20 nt, Artificial Sequence
  spacer sequence CTCN PAM
caaagugcugggauuacagg

SEQ ID NO: 24842 - RNA, 20 nt, Artificial Sequence
  spacer sequence CTCN PAM
gugcguaugaaauaauccac

SEQ ID NO: 24843 - RNA, 20 nt, Artificial Sequence
  spacer sequence CTCN PAM
ugccuguaaucccagcacuu

SEQ ID NO: 24844 - RNA, 20 nt, Artificial Sequence
  spacer sequence CTCN PAM
caaagugcugggauuacagg

SEQ ID NO: 24845 - RNA, 20 nt, Artificial Sequence
  spacer sequence CTCN PAM
gccucccaaagugcugggau

SEQ ID NO: 24846 - RNA, 20 nt, Artificial Sequence
  spacer sequence CTCN PAM
accaacccaaggcacccuug

SEQ ID NO: 24847 - RNA, 20 nt, Artificial Sequence
  spacer sequence CTCN PAM
agggugccuuggguuggugg

SEQ ID NO: 24848 - RNA, 20 nt, Artificial Sequence
  spacer sequence CTCN PAM
agccaagucucaagggugcc

SEQ ID NO: 24849 - RNA, 20 nt, Artificial Sequence
  spacer sequence CTCN PAM
cuccagccaagucucaaggg

SEQ ID NO: 24850 - RNA, 20 nt, Artificial Sequence
  spacer sequence CTCN PAM
uaaaauucuuccucacucca

SEQ ID NO: 24851 - RNA, 20 nt, Artificial Sequence
  spacer sequence CTCN PAM
gugggccccuccuaaaauuc

SEQ ID NO: 24852 - RNA, 20 nt, Artificial Sequence
  spacer sequence CTCN PAM
acccaguggcucagugggcc

SEQ ID NO: 24853 - RNA, 20 nt, Artificial Sequence
  spacer sequence CTCN PAM
cuaauauagaggaggaaaag

SEQ ID NO: 24854 - RNA, 20 nt, Artificial Sequence
  spacer sequence CTCN PAM
aauauagaggaggaaaagaa

SEQ ID NO: 24855 - RNA, 20 nt, Artificial Sequence
  spacer sequence CTCN PAM
auauuagagagaaggucugu

SEQ ID NO: 24856 - RNA, 20 nt, Artificial Sequence
  spacer sequence CTCN PAM
ucuauauuagagagaagguc

SEQ ID NO: 24857 - RNA, 20 nt, Artificial Sequence
  spacer sequence CTCN PAM
cuucuuuuccuccucuauau

SEQ ID NO: 24858 - RNA, 20 nt, Artificial Sequence
  spacer sequence CTCN PAM
agcuaggauugugaaacacc

SEQ ID NO: 24859 - RNA, 20 nt, Artificial Sequence
  spacer sequence CTCN PAM
uaggagcggccgccugcggu

SEQ ID NO: 24860 - RNA, 20 nt, Artificial Sequence
  spacer sequence CTCN PAM
uaggaggaccagaacugcca

SEQ ID NO: 24861 - RNA, 20 nt, Artificial Sequence
  spacer sequence CTCN PAM
ccgcaggcggccgcuccuag

SEQ ID NO: 24862 - RNA, 20 nt, Artificial Sequence
  spacer sequence CTCN PAM
ucaccgcaggcggccgcucc

SEQ ID NO: 24863 - RNA, 20 nt, Artificial Sequence
  spacer sequence CTCN PAM
ccccaggcccaggccuccuc

SEQ ID NO: 24864 - RNA, 20 nt, Artificial Sequence
  spacer sequence CTCN PAM
cgcgcccgcccacccacagc

SEQ ID NO: 24865 - RNA, 20 nt, Artificial Sequence
  spacer sequence CTCN PAM
gccgcccaggauccgaccac

SEQ ID NO: 24866 - RNA, 20 nt, Artificial Sequence
  spacer sequence CTCN PAM
cugccgcccaggauccgacc

SEQ ID NO: 24867 - RNA, 20 nt, Artificial Sequence
  spacer sequence CTCN PAM
gccucucugccgcccaggau

SEQ ID NO: 24868 - RNA, 20 nt, Artificial Sequence
  spacer sequence CTCN PAM
gccaccaggacgccgccgca

SEQ ID NO: 24869 - RNA, 20 nt, Artificial Sequence
  spacer sequence CTCN PAM
gcacccacugcuccgccacc

SEQ ID NO: 24870 - RNA, 20 nt, Artificial Sequence
  spacer sequence CTCN PAM
aggcagugcgccgcgcucag

SEQ ID NO: 24871 - RNA, 20 nt, Artificial Sequence
  spacer sequence CTCN PAM
cgcguccuccaggcagugcg

SEQ ID NO: 24872 - RNA, 20 nt, Artificial Sequence
  spacer sequence CTCN PAM
ucccccgcgcggcgcgggca

SEQ ID NO: 24873 - RNA, 20 nt, Artificial Sequence
  spacer sequence CTCN PAM
guccgguccccagggccgac

SEQ ID NO: 24874 - RNA, 20 nt, Artificial Sequence
  spacer sequence CTCN PAM
ugggcgcgcacucccugucg

SEQ ID NO: 24875 - RNA, 20 nt, Artificial Sequence
  spacer sequence CTCN PAM
cugucgcagccggagcccuc

SEQ ID NO: 24876 - RNA, 20 nt, Artificial Sequence
  spacer sequence CTCN PAM
ggcugcgacagggagugcgc

SEQ ID NO: 24877 - RNA, 20 nt, Artificial Sequence
  spacer sequence CTCN PAM
aagcgccuguacgacgugcu

SEQ ID NO: 24878 - RNA, 20 nt, Artificial Sequence
  spacer sequence CTCN PAM
gcgcagugccccacccggac

SEQ ID NO: 24879 - RNA, 20 nt, Artificial Sequence
  spacer sequence CTCN PAM
ugcugcuacaggucggcccc

SEQ ID NO: 24880 - RNA, 20 nt, Artificial Sequence
  spacer sequence CTCN PAM
ugcggcgcugggauccccgg

SEQ ID NO: 24881 - RNA, 20 nt, Artificial Sequence
  spacer sequence CTCN PAM
acccucagcugucggagaag

SEQ ID NO: 24882 - RNA, 20 nt, Artificial Sequence
  spacer sequence CTCN PAM
gcugucggagaaggccacac

SEQ ID NO: 24883 - RNA, 20 nt, Artificial Sequence
  spacer sequence CTCN PAM
gacagcugaggguggaggcg

SEQ ID NO: 24884 - RNA, 20 nt, Artificial Sequence
  spacer sequence CTCN PAM
cugcgacguggccggcuggg

SEQ ID NO: 24885 - RNA, 20 nt, Artificial Sequence
  spacer sequence CTCN PAM
gcgacguggccggcuggggc

SEQ ID NO: 24886 - RNA, 20 nt, Artificial Sequence
  spacer sequence CTCN PAM
ugccagugcuggaccgcgcc

SEQ ID NO: 24887 - RNA, 20 nt, Artificial Sequence
  spacer sequence CTCN PAM
gugauggcgccgucguggug

SEQ ID NO: 24888 - RNA, 20 nt, Artificial Sequence
  spacer sequence CTCN PAM
gcgcacaucaagcgcucggu

SEQ ID NO: 24889 - RNA, 20 nt, Artificial Sequence
  spacer sequence CTCN PAM
ccgcgcacaucaagcgcucg

SEQ ID NO: 24890 - RNA, 20 nt, Artificial Sequence
  spacer sequence CTCN PAM
ccuugcagcugucccggcga

SEQ ID NO: 24891 - RNA, 20 nt, Artificial Sequence
  spacer sequence CTCN PAM
caggccugaaggcucaccuu

SEQ ID NO: 24892 - RNA, 20 nt, Artificial Sequence
  spacer sequence CTCN PAM
ucccaggccugaaggcucac

SEQ ID NO: 24893 - RNA, 20 nt, Artificial Sequence
  spacer sequence CTCN PAM
cggccccguccuguuccggc

SEQ ID NO: 24894 - RNA, 20 nt, Artificial Sequence
  spacer sequence CTCN PAM
gggggcccgcuggugugcgg

SEQ ID NO: 24895 - RNA, 20 nt, Artificial Sequence
  spacer sequence CTCN PAM
agggcguggucaccucgggc

SEQ ID NO: 24896 - RNA, 20 nt, Artificial Sequence
  spacer sequence CTCN PAM
agcacgcccccgcacaccag

SEQ ID NO: 24897 - RNA, 20 nt, Artificial Sequence
  spacer sequence CTCN PAM
ggcucgcgcguuugcggcaa

SEQ ID NO: 24898 - RNA, 20 nt, Artificial Sequence
  spacer sequence CTCN PAM
cgcguuugcggcaaccgcaa

SEQ ID NO: 24899 - RNA, 20 nt, Artificial Sequence
  spacer sequence CTCN PAM
ccacgcggguguagaucccg

SEQ ID NO: 24900 - RNA, 20 nt, Artificial Sequence
  spacer sequence CTCN PAM
ggacuuuguugcuuggguga

SEQ ID NO: 24901 - RNA, 20 nt, Artificial Sequence
  spacer sequence CTCN PAM
ugcaucugguuggucuuuau

SEQ ID NO: 24902 - RNA, 20 nt, Artificial Sequence
  spacer sequence CTCN PAM
ugaguagcuggggcuacagg

SEQ ID NO: 24903 - RNA, 20 nt, Artificial Sequence
  spacer sequence CTCN PAM
gccuccugaguagcuggggc

SEQ ID NO: 24904 - RNA, 20 nt, Artificial Sequence
  spacer sequence CTCN PAM
ugccucagccuccugaguag

SEQ ID NO: 24905 - RNA, 20 nt, Artificial Sequence
  spacer sequence CTCN PAM
cggguucaagcuauccuccu

SEQ ID NO: 24906 - RNA, 20 nt, Artificial Sequence
  spacer sequence CTCN PAM
gccucccggguucaagcuau

SEQ ID NO: 24907 - RNA, 20 nt, Artificial Sequence
  spacer sequence CTCN PAM
cugcaaccuccgccucccgg

SEQ ID NO: 24908 - RNA, 20 nt, Artificial Sequence
  spacer sequence CTCN PAM
gcucacugcaaccuccgccu

SEQ ID NO: 24909 - RNA, 20 nt, Artificial Sequence
  spacer sequence CTCN PAM
gaccugggugacagagcgag

SEQ ID NO: 24910 - RNA, 20 nt, Artificial Sequence
  spacer sequence CTCN PAM
gucacccaggucggaguaca

SEQ ID NO: 24911 - RNA, 20 nt, Artificial Sequence
  spacer sequence CTCN PAM
gaucucccggccccugaagc

SEQ ID NO: 24912 - RNA, 20 nt, Artificial Sequence
  spacer sequence CTCN PAM
cggccccugaagcugcccac

SEQ ID NO: 24913 - RNA, 20 nt, Artificial Sequence
  spacer sequence CTCN PAM
ugggcagcuucaggggccgg

SEQ ID NO: 24914 - RNA, 20 nt, Artificial Sequence
  spacer sequence CTCN PAM
ccagugcucccaucuccucc

SEQ ID NO: 24915 - RNA, 20 nt, Artificial Sequence
  spacer sequence CTCN PAM
caucuccuccccguccaccc

SEQ ID NO: 24916 - RNA, 20 nt, Artificial Sequence
  spacer sequence CTCN PAM
ccagcgcuccugcacucugg

SEQ ID NO: 24917 - RNA, 20 nt, Artificial Sequence
  spacer sequence CTCN PAM
ugcacucuggucucugcaga

SEQ ID NO: 24918 - RNA, 20 nt, Artificial Sequence
  spacer sequence CTCN PAM
ggucucugcagagccacaug

SEQ ID NO: 24919 - RNA, 20 nt, Artificial Sequence
  spacer sequence CTCN PAM
gcagagccacauggaaacgc

SEQ ID NO: 24920 - RNA, 20 nt, Artificial Sequence
  spacer sequence CTCN PAM
gcagagaccagagugcagga

SEQ ID NO: 24921 - RNA, 20 nt, Artificial Sequence
  spacer sequence CTCN PAM
ugagcucgagaggaggucgc

SEQ ID NO: 24922 - RNA, 20 nt, Artificial Sequence
  spacer sequence CTCN PAM
ggagugugugggccuccauc

SEQ ID NO: 24923 - RNA, 20 nt, Artificial Sequence
  spacer sequence CTCN PAM
agaggaggucgcaggagugg

SEQ ID NO: 24924 - RNA, 20 nt, Artificial Sequence
  spacer sequence CTCN PAM
agcucaggagugugugggcc

SEQ ID NO: 24925 - RNA, 20 nt, Artificial Sequence
  spacer sequence CTCN PAM
cgagcucaggaguguguggg

SEQ ID NO: 24926 - RNA, 20 nt, Artificial Sequence
  spacer sequence CTCN PAM
ucucgagcucaggagugugu

SEQ ID NO: 24927 - RNA, 20 nt, Artificial Sequence
  spacer sequence CTCN PAM
ugcgaccuccucucgagcuc

SEQ ID NO: 24928 - RNA, 20 nt, Artificial Sequence
  spacer sequence CTCN PAM
cggccccacuccugcgaccu

SEQ ID NO: 24929 - RNA, 20 nt, Artificial Sequence
  spacer sequence CTCN PAM
gaggauggccagggggacgg

SEQ ID NO: 24930 - RNA, 20 nt, Artificial Sequence
  spacer sequence CTCN PAM
uggccugucuuuaaauccuu

SEQ ID NO: 24931 - RNA, 20 nt, Artificial Sequence
  spacer sequence CTCN PAM
cggcaccaaaucgaggucgu

SEQ ID NO: 24932 - RNA, 20 nt, Artificial Sequence
  spacer sequence CTCN PAM
auuuggugccgggagccugu

SEQ ID NO: 24933 - RNA, 20 nt, Artificial Sequence
  spacer sequence CTCN PAM
gcuaccccucagcugccccu

SEQ ID NO: 24934 - RNA, 20 nt, Artificial Sequence
  spacer sequence CTCN PAM
ucagcuaccccucagcugcc

SEQ ID NO: 24935 - RNA, 20 nt, Artificial Sequence
  spacer sequence CTCN PAM
gcuacuccucagcuaccccu

SEQ ID NO: 24936 - RNA, 20 nt, Artificial Sequence
  spacer sequence CTCN PAM
gggguagcugaggggcaccc

SEQ ID NO: 24937 - RNA, 20 nt, Artificial Sequence
  spacer sequence CTCN PAM
gcuaccccugagcccagcug

SEQ ID NO: 24938 - RNA, 20 nt, Artificial Sequence
  spacer sequence CTCN PAM
gguggcgggugccccucagc

SEQ ID NO: 24939 - RNA, 20 nt, Artificial Sequence
  spacer sequence CTCN PAM
cacugcuucaccgccguggu

SEQ ID NO: 24940 - RNA, 20 nt, Artificial Sequence
  spacer sequence CTCN PAM
agucgcccaacagaaccacg

SEQ ID NO: 24941 - RNA, 20 nt, Artificial Sequence
  spacer sequence CTCN PAM
ccgcaggugcggcuguguca

SEQ ID NO: 24942 - RNA, 20 nt, Artificial Sequence
  spacer sequence CTCN PAM
gugccugccuccccgcaggu

SEQ ID NO: 24943 - RNA, 20 nt, Artificial Sequence
  spacer sequence CTCN PAM
gggagucagcgguuccgggg

SEQ ID NO: 24944 - RNA, 20 nt, Artificial Sequence
  spacer sequence CTCN PAM
cagagaugugccgcugggga

SEQ ID NO: 24945 - RNA, 20 nt, Artificial Sequence
  spacer sequence CTCN PAM
ccuggugcaggccuugcauu

SEQ ID NO: 24946 - RNA, 20 nt, Artificial Sequence
  spacer sequence CTCN PAM
guggggcaagcgccaaggug

SEQ ID NO: 24947 - RNA, 20 nt, Artificial Sequence
  spacer sequence CTCN PAM
gcagguggucgaucuugggc

SEQ ID NO: 24948 - RNA, 20 nt, Artificial Sequence
  spacer sequence CTCN PAM
cgccagggccccaggccagc

SEQ ID NO: 24949 - RNA, 20 nt, Artificial Sequence
  spacer sequence CTCN PAM
cccgccagggccccaggcca

SEQ ID NO: 24950 - RNA, 20 nt, Artificial Sequence
  spacer sequence CTCN PAM
ccucucccgccagggcccca

SEQ ID NO: 24951 - RNA, 20 nt, Artificial Sequence
  spacer sequence CTCN PAM
cguucuccccucucccgcca

SEQ ID NO: 24952 - RNA, 20 nt, Artificial Sequence
  spacer sequence CTCN PAM
cucacguucuccccucuccc

SEQ ID NO: 24953 - RNA, 20 nt, Artificial Sequence
  spacer sequence CTCN PAM
ccaggugcgugugucccugc

SEQ ID NO: 24954 - RNA, 20 nt, Artificial Sequence
  spacer sequence CTCN PAM
acggccucgccaggugcgug

SEQ ID NO: 24955 - RNA, 20 nt, Artificial Sequence
  spacer sequence CTCN PAM
uccggcucgcucgcugggcc

SEQ ID NO: 24956 - RNA, 20 nt, Artificial Sequence
  spacer sequence CTCN PAM
cucgcugggcccucaucgcg

SEQ ID NO: 24957 - RNA, 20 nt, Artificial Sequence
  spacer sequence CTCN PAM
cugggcccucaucgcgaccu

SEQ ID NO: 24958 - RNA, 20 nt, Artificial Sequence
  spacer sequence CTCN PAM
ucgcgaccugcggagagagg

SEQ ID NO: 24959 - RNA, 20 nt, Artificial Sequence
  spacer sequence CTCN PAM
gcaggucgcgaugagggccc

SEQ ID NO: 24960 - RNA, 20 nt, Artificial Sequence
  spacer sequence CTCN PAM
ccgcaggucgcgaugagggc

SEQ ID NO: 24961 - RNA, 20 nt, Artificial Sequence
  spacer sequence CTCN PAM
cuccgcaggucgcgaugagg

SEQ ID NO: 24962 - RNA, 20 nt, Artificial Sequence
  spacer sequence CTCN PAM
gcaccccugacuggggcacc

SEQ ID NO: 24963 - RNA, 20 nt, Artificial Sequence
  spacer sequence CTCN PAM
ccccucuccccgcucucccc

SEQ ID NO: 24964 - RNA, 20 nt, Artificial Sequence
  spacer sequence CTCN PAM
ccgcucuccccucuccccgc

SEQ ID NO: 24965 - RNA, 20 nt, Artificial Sequence
  spacer sequence CTCN PAM
ccccgcucuccccucucccc

SEQ ID NO: 24966 - RNA, 20 nt, Artificial Sequence
  spacer sequence CTCN PAM
ccucuccccgcucuccccuc

SEQ ID NO: 24967 - RNA, 20 nt, Artificial Sequence
  spacer sequence CTCN PAM
ccccucuccccgcucucccc

SEQ ID NO: 24968 - RNA, 20 nt, Artificial Sequence
  spacer sequence CTCN PAM
ccgcucuccccucuccccgc

SEQ ID NO: 24969 - RNA, 20 nt, Artificial Sequence
  spacer sequence CTCN PAM
ccgcuccccgcucuccccuc

SEQ ID NO: 24970 - RNA, 20 nt, Artificial Sequence
  spacer sequence CTCN PAM
ccgcuccccgcuccccgcuc

SEQ ID NO: 24971 - RNA, 20 nt, Artificial Sequence
  spacer sequence CTCN PAM
ccccgcuccccgcuccccgc

SEQ ID NO: 24972 - RNA, 20 nt, Artificial Sequence
  spacer sequence CTCN PAM
ccucuccccgcuccccgcuc

SEQ ID NO: 24973 - RNA, 20 nt, Artificial Sequence
  spacer sequence CTCN PAM
ccccucuccccgcuccccgc

SEQ ID NO: 24974 - RNA, 20 nt, Artificial Sequence
  spacer sequence CTCN PAM
ccgcucuccccucuccccgc

SEQ ID NO: 24975 - RNA, 20 nt, Artificial Sequence
  spacer sequence CTCN PAM
ccgcuccccgcucuccccuc

SEQ ID NO: 24976 - RNA, 20 nt, Artificial Sequence
  spacer sequence CTCN PAM
ccccgcuccccgcucucccc

SEQ ID NO: 24977 - RNA, 20 nt, Artificial Sequence
  spacer sequence CTCN PAM
ccucuccccgcuccccgcuc

SEQ ID NO: 24978 - RNA, 20 nt, Artificial Sequence
  spacer sequence CTCN PAM
cagcagauccagagcuuggu

SEQ ID NO: 24979 - RNA, 20 nt, Artificial Sequence
  spacer sequence CTCN PAM
ggaucugcugugaggcaccc

SEQ ID NO: 24980 - RNA, 20 nt, Artificial Sequence
  spacer sequence CTCN PAM
ccaagcucuggaucugcugu

SEQ ID NO: 24981 - RNA, 20 nt, Artificial Sequence
  spacer sequence CTCN PAM
uccgccugcucaccaagcuc

SEQ ID NO: 24982 - RNA, 20 nt, Artificial Sequence
  spacer sequence CTCN PAM
gauacccaggacagcauguc

SEQ ID NO: 24983 - RNA, 20 nt, Artificial Sequence
  spacer sequence CTCN PAM
cugggcaugcuucgggaauu

SEQ ID NO: 24984 - RNA, 20 nt, Artificial Sequence
  spacer sequence CTCN PAM
gcagggaacccugcccgaaa

SEQ ID NO: 24985 - RNA, 20 nt, Artificial Sequence
  spacer sequence CTCN PAM
uucgggcaggguucccugcu

SEQ ID NO: 24986 - RNA, 20 nt, Artificial Sequence
  spacer sequence CTCN PAM
cccccacccccccgccggua

SEQ ID NO: 24987 - RNA, 20 nt, Artificial Sequence
  spacer sequence CTCN PAM
aaccucgcccccaccccccc

SEQ ID NO: 24988 - RNA, 20 nt, Artificial Sequence
  spacer sequence CTCN PAM
accuucaguucugcggcuug

SEQ ID NO: 24989 - RNA, 20 nt, Artificial Sequence
  spacer sequence CTCN PAM
gccccaccccuacacgaagg

SEQ ID NO: 24990 - RNA, 20 nt, Artificial Sequence
  spacer sequence CTCN PAM
uucucagccccaccccuaca

SEQ ID NO: 24991 - RNA, 20 nt, Artificial Sequence
  spacer sequence CTCN PAM
caggcccugcuccuucucag

SEQ ID NO: 24992 - RNA, 20 nt, Artificial Sequence
  spacer sequence CTCN PAM
ccuaaggccccgccccccac

SEQ ID NO: 24993 - RNA, 20 nt, Artificial Sequence
  spacer sequence CTCN PAM
ccccuaaggccccgcccccc

SEQ ID NO: 24994 - RNA, 20 nt, Artificial Sequence
  spacer sequence CTCN PAM
ugcagugggugggcgacuuc

SEQ ID NO: 24995 - RNA, 20 nt, Artificial Sequence
  spacer sequence CTCN PAM
gucuugagguugaucaugac

SEQ ID NO: 24996 - RNA, 20 nt, Artificial Sequence
  spacer sequence CTCN PAM
agacggaggaauuugugcug

SEQ ID NO: 24997 - RNA, 20 nt, Artificial Sequence
  spacer sequence CTCN PAM
uuguagacauugacaagguc

SEQ ID NO: 24998 - RNA, 20 nt, Artificial Sequence
  spacer sequence CTCN PAM
ggccucuuguacacacaggg

SEQ ID NO: 24999 - RNA, 20 nt, Artificial Sequence
  spacer sequence CTCN PAM
uguacacacagggugaccua

SEQ ID NO: 25000 - RNA, 20 nt, Artificial Sequence
  spacer sequence CTCN PAM
aggccccgggcguggaaaag

SEQ ID NO: 25001 - RNA, 20 nt, Artificial Sequence
  spacer sequence CTCN PAM
agguuucuuucaucuauuua

SEQ ID NO: 25002 - RNA, 20 nt, Artificial Sequence
  spacer sequence CTCN PAM
gucagccggucgccggggcu

SEQ ID NO: 25003 - RNA, 20 nt, Artificial Sequence
  spacer sequence CTCN PAM
ugucaggcguguugagaaag

SEQ ID NO: 25004 - RNA, 20 nt, Artificial Sequence
  spacer sequence CTCN PAM
acacgccugacaagagcccc

SEQ ID NO: 25005 - RNA, 20 nt, Artificial Sequence
  spacer sequence CTCN PAM
acccugaagucgcugcugcg

SEQ ID NO: 25006 - RNA, 20 nt, Artificial Sequence
  spacer sequence CTCN PAM
ucgccaucagcuccacccug

SEQ ID NO: 25007 - RNA, 20 nt, Artificial Sequence
  spacer sequence CTCN PAM
uccucaucgccaucagcucc

SEQ ID NO: 25008 - RNA, 20 nt, Artificial Sequence
  spacer sequence CTCN PAM
gcaagcugucgcccugcacg

SEQ ID NO: 25009 - RNA, 20 nt, Artificial Sequence
  spacer sequence CTCN PAM
cucugcaagcugucgcccug

SEQ ID NO: 25010 - RNA, 20 nt, Artificial Sequence
  spacer sequence CTCN PAM
acccggauccuggccaugaa

SEQ ID NO: 25011 - RNA, 20 nt, Artificial Sequence
  spacer sequence CTCN PAM
ccacccggauccuggccaug

SEQ ID NO: 25012 - RNA, 20 nt, Artificial Sequence
  spacer sequence CTCN PAM
gguccucuccacccggaucc

SEQ ID NO: 25013 - RNA, 20 nt, Artificial Sequence
  spacer sequence CTCN PAM
ggccccuuggggugaccugg

SEQ ID NO: 25014 - RNA, 20 nt, Artificial Sequence
  spacer sequence CTCN PAM
gcuccggccccuugggguga

SEQ ID NO: 25015 - RNA, 20 nt, Artificial Sequence
  spacer sequence CTCN PAM
agcugaggagaagagcaguu

SEQ ID NO: 25016 - RNA, 20 nt, Artificial Sequence
  spacer sequence CTCN PAM
gcuggagccuuggcgggcgc

SEQ ID NO: 25017 - RNA, 20 nt, Artificial Sequence
  spacer sequence CTCN PAM
ucagcuggagccuuggcggg

SEQ ID NO: 25018 - RNA, 20 nt, Artificial Sequence
  spacer sequence CTCN PAM
ucuccucagcuggagccuug

SEQ ID NO: 25019 - RNA, 20 nt, Artificial Sequence
  spacer sequence CTCN PAM
gacaccaggcgcucggucag

SEQ ID NO: 25020 - RNA, 20 nt, Artificial Sequence
  spacer sequence CTCN PAM
ucgugcagcuucuccaccag

SEQ ID NO: 25021 - RNA, 20 nt, Artificial Sequence
  spacer sequence CTCN PAM
ugcagcuucuccaccaggcu

SEQ ID NO: 25022 - RNA, 20 nt, Artificial Sequence
  spacer sequence CTCN PAM
accaggcucuguaccauacu

SEQ ID NO: 25023 - RNA, 20 nt, Artificial Sequence
  spacer sequence CTCN PAM
guaccauacugggcugcacg

SEQ ID NO: 25024 - RNA, 20 nt, Artificial Sequence
  spacer sequence CTCN PAM
agcaggaagagcaggugccg

SEQ ID NO: 25025 - RNA, 20 nt, Artificial Sequence
  spacer sequence CTCN PAM
uccugcuggaguacugcaug

SEQ ID NO: 25026 - RNA, 20 nt, Artificial Sequence
  spacer sequence CTCN PAM
agcggguggcccauggaagg

SEQ ID NO: 25027 - RNA, 20 nt, Artificial Sequence
  spacer sequence CTCN PAM
ccuuccaugggccacccgcu

SEQ ID NO: 25028 - RNA, 20 nt, Artificial Sequence
  spacer sequence CTCN PAM
caccuuccaugggccacccg

SEQ ID NO: 25029 - RNA, 20 nt, Artificial Sequence
  spacer sequence CTCN PAM
gccucucaccuuccaugggc

SEQ ID NO: 25030 - RNA, 20 nt, Artificial Sequence
  spacer sequence CTCN PAM
gcugccagagacagagccca

SEQ ID NO: 25031 - RNA, 20 nt, Artificial Sequence
  spacer sequence CTCN PAM
ggcagcugagcgugcuccgc

SEQ ID NO: 25032 - RNA, 20 nt, Artificial Sequence
  spacer sequence CTCN PAM
gucucuggcagcugagcgug

SEQ ID NO: 25033 - RNA, 20 nt, Artificial Sequence
  spacer sequence CTCN PAM
uugggcucugucucuggcag

SEQ ID NO: 25034 - RNA, 20 nt, Artificial Sequence
  spacer sequence CTCN PAM
ccuugggcucugucucuggc

SEQ ID NO: 25035 - RNA, 20 nt, Artificial Sequence
  spacer sequence CTCN PAM
ccgggcucuccuugggcucu

SEQ ID NO: 25036 - RNA, 20 nt, Artificial Sequence
  spacer sequence CTCN PAM
ccuucccgugguugucaaug

SEQ ID NO: 25037 - RNA, 20 nt, Artificial Sequence
  spacer sequence CTCN PAM
gugggcauugacaaccacgg

SEQ ID NO: 25038 - RNA, 20 nt, Artificial Sequence
  spacer sequence CTCN PAM
ccuuccccugguugucaaug

SEQ ID NO: 25039 - RNA, 20 nt, Artificial Sequence
  spacer sequence CTCN PAM
gguugucaaugcccagcagc

SEQ ID NO: 25040 - RNA, 20 nt, Artificial Sequence
  spacer sequence CTCN PAM
ccuucccaugguugucaaug

SEQ ID NO: 25041 - RNA, 20 nt, Artificial Sequence
  spacer sequence CTCN PAM
ccuuccccugguugucaaug

SEQ ID NO: 25042 - RNA, 20 nt, Artificial Sequence
  spacer sequence CTCN PAM
ccuucccguggcugucaauc

SEQ ID NO: 25043 - RNA, 20 nt, Artificial Sequence
  spacer sequence CTCN PAM
uccacaggccucggggccgc

SEQ ID NO: 25044 - RNA, 20 nt, Artificial Sequence
  spacer sequence CTCN PAM
gggccgcggagcuguagaag

SEQ ID NO: 25045 - RNA, 20 nt, Artificial Sequence
  spacer sequence CTCN PAM
gcggccccgaggccugugga

SEQ ID NO: 25046 - RNA, 20 nt, Artificial Sequence
  spacer sequence CTCN PAM
cugcagaccauggccgucuu

SEQ ID NO: 25047 - RNA, 20 nt, Artificial Sequence
  spacer sequence CTCN PAM
cacugcagaccauggccguc

SEQ ID NO: 25048 - RNA, 20 nt, Artificial Sequence
  spacer sequence CTCN PAM
guucacaccaggggaguugg

SEQ ID NO: 25049 - RNA, 20 nt, Artificial Sequence
  spacer sequence CTCN PAM
accguaccgaggccagggua

SEQ ID NO: 25050 - RNA, 20 nt, Artificial Sequence
  spacer sequence CTCN PAM
guacgguggagccagcggca

SEQ ID NO: 25051 - RNA, 20 nt, Artificial Sequence
  spacer sequence CTCN PAM
agguggccagcgacacacag

SEQ ID NO: 25052 - RNA, 20 nt, Artificial Sequence
  spacer sequence CTCN PAM
ccaacaccgaccucaaggug

SEQ ID NO: 25053 - RNA, 20 nt, Artificial Sequence
  spacer sequence CTCN PAM
cucaccaacaccgaccucaa

SEQ ID NO: 25054 - RNA, 20 nt, Artificial Sequence
  spacer sequence CTCN PAM
aauggcggauccuaucggcc

SEQ ID NO: 25055 - RNA, 20 nt, Artificial Sequence
  spacer sequence CTCN PAM
gcagccggcgggagacucac

SEQ ID NO: 25056 - RNA, 20 nt, Artificial Sequence
  spacer sequence CTCN PAM
cgccggcugcggaggcccug

SEQ ID NO: 25057 - RNA, 20 nt, Artificial Sequence
  spacer sequence CTCN PAM
cccacgggggagaucugcug

SEQ ID NO: 25058 - RNA, 20 nt, Artificial Sequence
  spacer sequence CTCN PAM
cccgugggugagucucccgc

SEQ ID NO: 25059 - RNA, 20 nt, Artificial Sequence
  spacer sequence CTCN PAM
ccgugaacaacaucuuccag

SEQ ID NO: 25060 - RNA, 20 nt, Artificial Sequence
  spacer sequence CTCN PAM
uugcgcagggaccagcacuc

SEQ ID NO: 25061 - RNA, 20 nt, Artificial Sequence
  spacer sequence CTCN PAM
acgaugcugcuggucuggcu

SEQ ID NO: 25062 - RNA, 20 nt, Artificial Sequence
  spacer sequence CTCN PAM
cccgcaggugcuuuugugcg

SEQ ID NO: 25063 - RNA, 20 nt, Artificial Sequence
  spacer sequence CTCN PAM
cccccaccucccccgcaggu

SEQ ID NO: 25064 - RNA, 20 nt, Artificial Sequence
  spacer sequence CTCN PAM
gacaugucccgggccaggaa

SEQ ID NO: 25065 - RNA, 20 nt, Artificial Sequence
  spacer sequence CTCN PAM
aguuccuggcccgggacaug

SEQ ID NO: 25066 - RNA, 20 nt, Artificial Sequence
  spacer sequence CTCN PAM
accgcaaggacaaguuuccc

SEQ ID NO: 25067 - RNA, 20 nt, Artificial Sequence
  spacer sequence CTCN PAM
cuguucaugcgcugcaccac

SEQ ID NO: 25068 - RNA, 20 nt, Artificial Sequence
  spacer sequence CTCN PAM
gugucgauacggcacuucuc

SEQ ID NO: 25069 - RNA, 20 nt, Artificial Sequence
  spacer sequence CTCN PAM
cucaccacgcucacgcacac

SEQ ID NO: 25070 - RNA, 20 nt, Artificial Sequence
  spacer sequence CTCN PAM
ccacgcucacgcacaccuug

SEQ ID NO: 25071 - RNA, 20 nt, Artificial Sequence
  spacer sequence CTCN PAM
cgcacaccuuguagaacugc

SEQ ID NO: 25072 - RNA, 20 nt, Artificial Sequence
  spacer sequence CTCN PAM
cgguggacgucagcaccugc

SEQ ID NO: 25073 - RNA, 20 nt, Artificial Sequence
  spacer sequence CTCN PAM
guggacgucagcaccugccc

SEQ ID NO: 25074 - RNA, 20 nt, Artificial Sequence
  spacer sequence CTCN PAM
augggcuugccgccgaacag

SEQ ID NO: 25075 - RNA, 20 nt, Artificial Sequence
  spacer sequence CTCN PAM
cgcuguucggcggcaagccc

SEQ ID NO: 25076 - RNA, 20 nt, Artificial Sequence
  spacer sequence CTCN PAM
ccgucgcucacgcuguucgg

SEQ ID NO: 25077 - RNA, 20 nt, Artificial Sequence
  spacer sequence CTCN PAM
ggagaacuucuccccgaagc

SEQ ID NO: 25078 - RNA, 20 nt, Artificial Sequence
  spacer sequence CTCN PAM
cgagucaaguucucaccguc

SEQ ID NO: 25079 - RNA, 20 nt, Artificial Sequence
  spacer sequence CTCN PAM
ccgaagcuggaggcgcccga

SEQ ID NO: 25080 - RNA, 20 nt, Artificial Sequence
  spacer sequence CTCN PAM
agcuucggggagaaguucuc

SEQ ID NO: 25081 - RNA, 20 nt, Artificial Sequence
  spacer sequence CTCN PAM
acagucgggcgccuccagcu

SEQ ID NO: 25082 - RNA, 20 nt, Artificial Sequence
  spacer sequence CTCN PAM
cuucuccacagucgggcgcc

SEQ ID NO: 25083 - RNA, 20 nt, Artificial Sequence
  spacer sequence CTCN PAM
cucccuucuccacagucggg

SEQ ID NO: 25084 - RNA, 20 nt, Artificial Sequence
  spacer sequence CTCN PAM
cucccucccuucuccacagu

SEQ ID NO: 25085 - RNA, 20 nt, Artificial Sequence
  spacer sequence CTCN PAM
ucccucccucccuucuccac

SEQ ID NO: 25086 - RNA, 20 nt, Artificial Sequence
  spacer sequence CTCN PAM
ggcucaugggggcugcccca

SEQ ID NO: 25087 - RNA, 20 nt, Artificial Sequence
  spacer sequence CTCN PAM
ucugccucauccgcucacuc

SEQ ID NO: 25088 - RNA, 20 nt, Artificial Sequence
  spacer sequence CTCN PAM
uccgcucacucgggcaggac

SEQ ID NO: 25089 - RNA, 20 nt, Artificial Sequence
  spacer sequence CTCN PAM
cucgggcaggacacucaccu

SEQ ID NO: 25090 - RNA, 20 nt, Artificial Sequence
  spacer sequence CTCN PAM
ggcaggacacucaccuucuc

SEQ ID NO: 25091 - RNA, 20 nt, Artificial Sequence
  spacer sequence CTCN PAM
ccuucuccacgugcagggcc

SEQ ID NO: 25092 - RNA, 20 nt, Artificial Sequence
  spacer sequence CTCN PAM
acgugcagggccaguuucac

SEQ ID NO: 25093 - RNA, 20 nt, Artificial Sequence
  spacer sequence CTCN PAM
acuaggcugcccacugagcu

SEQ ID NO: 25094 - RNA, 20 nt, Artificial Sequence
  spacer sequence CTCN PAM
gugggcagccuaguggaggg

SEQ ID NO: 25095 - RNA, 20 nt, Artificial Sequence
  spacer sequence CTCN PAM
cccagcuauuagccaggugg

SEQ ID NO: 25096 - RNA, 20 nt, Artificial Sequence
  spacer sequence CTCN PAM
cagcuauuagccaggugguc

SEQ ID NO: 25097 - RNA, 20 nt, Artificial Sequence
  spacer sequence CTCN PAM
agcacuugaucugcccgucg

SEQ ID NO: 25098 - RNA, 20 nt, Artificial Sequence
  spacer sequence CTCN PAM
ugucagcagaugccgacggg

SEQ ID NO: 25099 - RNA, 20 nt, Artificial Sequence
  spacer sequence CTCN PAM
cggcuccugucagcagaugc

SEQ ID NO: 25100 - RNA, 20 nt, Artificial Sequence
  spacer sequence CTCN PAM
ggcucccggcuccugucagc

SEQ ID NO: 25101 - RNA, 20 nt, Artificial Sequence
  spacer sequence CTCN PAM
gcccaucccuggaagguucg

SEQ ID NO: 25102 - RNA, 20 nt, Artificial Sequence
  spacer sequence CTCN PAM
ccugacuggucccacuccag

SEQ ID NO: 25103 - RNA, 20 nt, Artificial Sequence
  spacer sequence CTCN PAM
aggcaggugauggccucgug

SEQ ID NO: 25104 - RNA, 20 nt, Artificial Sequence
  spacer sequence CTCN PAM
uggugcucugaggggaucga

SEQ ID NO: 25105 - RNA, 20 nt, Artificial Sequence
  spacer sequence CTCN PAM
gaggggaucgagugcagguc

SEQ ID NO: 25106 - RNA, 20 nt, Artificial Sequence
  spacer sequence CTCN PAM
gagcaccacgaggccaucac

SEQ ID NO: 25107 - RNA, 20 nt, Artificial Sequence
  spacer sequence CTCN PAM
auccccucagagcaccacga

SEQ ID NO: 25108 - RNA, 20 nt, Artificial Sequence
  spacer sequence CTCN PAM
guguccaggauguggaucau

SEQ ID NO: 25109 - RNA, 20 nt, Artificial Sequence
  spacer sequence CTCN PAM
cggccgcauggugucccgcc

SEQ ID NO: 25110 - RNA, 20 nt, Artificial Sequence
  spacer sequence CTCN PAM
caccugcuuccccucccggc

SEQ ID NO: 25111 - RNA, 20 nt, Artificial Sequence
  spacer sequence CTCN PAM
ucgccuucaccauggaccug

SEQ ID NO: 25112 - RNA, 20 nt, Artificial Sequence
  spacer sequence CTCN PAM
uggaccauuucucccacuca

SEQ ID NO: 25113 - RNA, 20 nt, Artificial Sequence
  spacer sequence CTCN PAM
cacucacagacguaggccaa

SEQ ID NO: 25114 - RNA, 20 nt, Artificial Sequence
  spacer sequence CTCN PAM
cagacguaggccaaguccau

SEQ ID NO: 25115 - RNA, 20 nt, Artificial Sequence
  spacer sequence CTCN PAM
ugugugauuugcggcggcca

SEQ ID NO: 25116 - RNA, 20 nt, Artificial Sequence
  spacer sequence CTCN PAM
ugcgggagggagguguggug

SEQ ID NO: 25117 - RNA, 20 nt, Artificial Sequence
  spacer sequence CTCN PAM
gccccgccucggcuacaggg

SEQ ID NO: 25118 - RNA, 20 nt, Artificial Sequence
  spacer sequence CTCN PAM
gccacagguguucccuguca

SEQ ID NO: 25119 - RNA, 20 nt, Artificial Sequence
  spacer sequence CTCN PAM
gccccgccucggccacaggu

SEQ ID NO: 25120 - RNA, 20 nt, Artificial Sequence
  spacer sequence CTCN PAM
gccacagguguucccuguca

SEQ ID NO: 25121 - RNA, 20 nt, Artificial Sequence
  spacer sequence CTCN PAM
ggguuugcggcggaaaccug

SEQ ID NO: 25122 - RNA, 20 nt, Artificial Sequence
  spacer sequence CTCN PAM
gggcucaggguuugcggcgg

SEQ ID NO: 25123 - RNA, 20 nt, Artificial Sequence
  spacer sequence CTCN PAM
ccuggucggcccgugcgcca

SEQ ID NO: 25124 - RNA, 20 nt, Artificial Sequence
  spacer sequence CTCN PAM
gcgggcguccgcggugcgau

SEQ ID NO: 25125 - RNA, 20 nt, Artificial Sequence
  spacer sequence CTCN PAM
ggucuggcgccgccaucuuc

SEQ ID NO: 25126 - RNA, 20 nt, Artificial Sequence
  spacer sequence CTCN PAM
ggcgacugguuguuaccgag

SEQ ID NO: 25127 - RNA, 20 nt, Artificial Sequence
  spacer sequence CTCN PAM
caaagacuucugggagggcg

SEQ ID NO: 25128 - RNA, 20 nt, Artificial Sequence
  spacer sequence CTCN PAM
cagaagucuuugggaggcgg

SEQ ID NO: 25129 - RNA, 20 nt, Artificial Sequence
  spacer sequence CTCN PAM
ggcucugccccgccuccggg

SEQ ID NO: 25130 - RNA, 20 nt, Artificial Sequence
  spacer sequence CTCN PAM
gccccgccuccggggcuauu

SEQ ID NO: 25131 - RNA, 20 nt, Artificial Sequence
  spacer sequence CTCN PAM
ggggcuauuugcauacgacc

SEQ ID NO: 25132 - RNA, 20 nt, Artificial Sequence
  spacer sequence CTCN PAM
uuguucuaccaaauauagcu

SEQ ID NO: 25133 - RNA, 20 nt, Artificial Sequence
  spacer sequence CTCN PAM
auauucgugcucgcuucggc

SEQ ID NO: 25134 - RNA, 20 nt, Artificial Sequence
  spacer sequence CTCN PAM
cuucggcagcacauauacua

SEQ ID NO: 25135 - RNA, 20 nt, Artificial Sequence
  spacer sequence CTCN PAM
guaucguuccaauuuuagua

SEQ ID NO: 25136 - RNA, 20 nt, Artificial Sequence
  spacer sequence CTCN PAM
cagaaacggaaucuugcucu

SEQ ID NO: 25137 - RNA, 20 nt, Artificial Sequence
  spacer sequence CTCN PAM
ggcuauguguguuuuucuuc

SEQ ID NO: 25138 - RNA, 20 nt, Artificial Sequence
  spacer sequence CTCN PAM
ggccucgggcuauguguguu

SEQ ID NO: 25139 - RNA, 20 nt, Artificial Sequence
  spacer sequence CTCN PAM
gcacccccuugcugcgugug

SEQ ID NO: 25140 - RNA, 20 nt, Artificial Sequence
  spacer sequence CTCN PAM
gcccuugcacuaccuugucu

SEQ ID NO: 25141 - RNA, 20 nt, Artificial Sequence
  spacer sequence CTCN PAM
uuuaugcuggggguccagga

SEQ ID NO: 25142 - RNA, 20 nt, Artificial Sequence
  spacer sequence CTCN PAM
ccuccuuuaugcuggggguc

SEQ ID NO: 25143 - RNA, 20 nt, Artificial Sequence
  spacer sequence CTCN PAM
cccacgccaccugugucggg

SEQ ID NO: 25144 - RNA, 20 nt, Artificial Sequence
  spacer sequence CTCN PAM
ucauucugcguguccucccc

SEQ ID NO: 25145 - RNA, 20 nt, Artificial Sequence
  spacer sequence CTCN PAM
uaggaccguggcuucugucc

SEQ ID NO: 25146 - RNA, 20 nt, Artificial Sequence
  spacer sequence CTCN PAM
gggcacacgcgcgcacacau

SEQ ID NO: 25147 - RNA, 20 nt, Artificial Sequence
  spacer sequence CTCN PAM
ugccagaagcaucuuguguu

SEQ ID NO: 25148 - RNA, 20 nt, Artificial Sequence
  spacer sequence CTCN PAM
gggacccugccccucaugcc

SEQ ID NO: 25149 - RNA, 20 nt, Artificial Sequence
  spacer sequence CTCN PAM
uucaagcuaaaaacugggag

SEQ ID NO: 25150 - RNA, 20 nt, Artificial Sequence
  spacer sequence CTCN PAM
ccccacugguaaaacauggg

SEQ ID NO: 25151 - RNA, 20 nt, Artificial Sequence
  spacer sequence CTCN PAM
ccaaaagggaaauuuaaaaa

SEQ ID NO: 25152 - RNA, 20 nt, Artificial Sequence
  spacer sequence CTCN PAM
aaaagggaaauuuaaaaauc

SEQ ID NO: 25153 - RNA, 20 nt, Artificial Sequence
  spacer sequence CTCN PAM
cccuccucacuugagcuuca

SEQ ID NO: 25154 - RNA, 20 nt, Artificial Sequence
  spacer sequence CTCN PAM
ucacuugagcuucagaccgg

SEQ ID NO: 25155 - RNA, 20 nt, Artificial Sequence
  spacer sequence CTCN PAM
cuugagcuucagaccgggcc

SEQ ID NO: 25156 - RNA, 20 nt, Artificial Sequence
  spacer sequence CTCN PAM
agugaggagggggaggcugg

SEQ ID NO: 25157 - RNA, 20 nt, Artificial Sequence
  spacer sequence CTCN PAM
gaaaccuuuuucgcuugggg

SEQ ID NO: 25158 - RNA, 20 nt, Artificial Sequence
  spacer sequence CTCN PAM
gauaccuucggcuaaaauau

SEQ ID NO: 25159 - RNA, 20 nt, Artificial Sequence
  spacer sequence CTCN PAM
cccagccaucaagcccuccg

SEQ ID NO: 25160 - RNA, 20 nt, Artificial Sequence
  spacer sequence CTCN PAM
gcggggccgccaucagcugu

SEQ ID NO: 25161 - RNA, 20 nt, Artificial Sequence
  spacer sequence CTCN PAM
agguaggcggacaggagcag

SEQ ID NO: 25162 - RNA, 20 nt, Artificial Sequence
  spacer sequence CTCN PAM
uguccgccuaccuggagcag

SEQ ID NO: 25163 - RNA, 20 nt, Artificial Sequence
  spacer sequence CTCN PAM
aggucagcaccugcagacgg

SEQ ID NO: 25164 - RNA, 20 nt, Artificial Sequence
  spacer sequence CTCN PAM
cguucuugccccgcuggucc

SEQ ID NO: 25165 - RNA, 20 nt, Artificial Sequence
  spacer sequence CTCN PAM
gucacccaugcuggagugca

SEQ ID NO: 25166 - RNA, 20 nt, Artificial Sequence
  spacer sequence CTCN PAM
cucugucacccaugcuggag

SEQ ID NO: 25167 - RNA, 20 nt, Artificial Sequence
  spacer sequence CTCN PAM
aaaaaaaaaaaaaaaaagaa

SEQ ID NO: 25168 - RNA, 20 nt, Artificial Sequence
  spacer sequence CTCN PAM
acuaaaaauacaaaauuagc

SEQ ID NO: 25169 - RNA, 20 nt, Artificial Sequence
  spacer sequence CTCN PAM
ggaggcugaggcaggagaau

SEQ ID NO: 25170 - RNA, 20 nt, Artificial Sequence
  spacer sequence CTCN PAM
cgaguagcugggaucccagg

SEQ ID NO: 25171 - RNA, 20 nt, Artificial Sequence
  spacer sequence CTCN PAM
gccucccgaguagcugggau

SEQ ID NO: 25172 - RNA, 20 nt, Artificial Sequence
  spacer sequence CTCN PAM
ugccucagccucccgaguag

SEQ ID NO: 25173 - RNA, 20 nt, Artificial Sequence
  spacer sequence CTCN PAM
ggguucaagcgauucuccug

SEQ ID NO: 25174 - RNA, 20 nt, Artificial Sequence
  spacer sequence CTCN PAM
accuccggguucaagcgauu

SEQ ID NO: 25175 - RNA, 20 nt, Artificial Sequence
  spacer sequence CTCN PAM
cugcaaccuccaccuccggg

SEQ ID NO: 25176 - RNA, 20 nt, Artificial Sequence
  spacer sequence CTCN PAM
cacagagggaacagagggag

SEQ ID NO: 25177 - RNA, 20 nt, Artificial Sequence
  spacer sequence CTCN PAM
gugggagacgcagcccccau

SEQ ID NO: 25178 - RNA, 20 nt, Artificial Sequence
  spacer sequence CTCN PAM
guucccucugugggagacgc

SEQ ID NO: 25179 - RNA, 20 nt, Artificial Sequence
  spacer sequence CTCN PAM
cucuguucccucugugggag

SEQ ID NO: 25180 - RNA, 20 nt, Artificial Sequence
  spacer sequence CTCN PAM
gcaacuccaggcggggcggc

SEQ ID NO: 25181 - RNA, 20 nt, Artificial Sequence
  spacer sequence CTCN PAM
aggcggggcggcagagacag

SEQ ID NO: 25182 - RNA, 20 nt, Artificial Sequence
  spacer sequence CTCN PAM
gccgccccgccuggaguugc

SEQ ID NO: 25183 - RNA, 20 nt, Artificial Sequence
  spacer sequence CTCN PAM
accugggaaaguggccaggg

SEQ ID NO: 25184 - RNA, 20 nt, Artificial Sequence
  spacer sequence CTCN PAM
gccaguaagugccgguggcc

SEQ ID NO: 25185 - RNA, 20 nt, Artificial Sequence
  spacer sequence CTCN PAM
ucucggccaguaagugccgg

SEQ ID NO: 25186 - RNA, 20 nt, Artificial Sequence
  spacer sequence CTCN PAM
cgaagcuguggggaacgggc

SEQ ID NO: 25187 - RNA, 20 nt, Artificial Sequence
  spacer sequence CTCN PAM
aagcuguggggaacgggcag

SEQ ID NO: 25188 - RNA, 20 nt, Artificial Sequence
  spacer sequence CTCN PAM
cugcccguuccccacagcuu

SEQ ID NO: 25189 - RNA, 20 nt, Artificial Sequence
  spacer sequence CTCN PAM
gaggguccgcucgccuggcc

SEQ ID NO: 25190 - RNA, 20 nt, Artificial Sequence
  spacer sequence CTCN PAM
gaggcugcggccaggugggc

SEQ ID NO: 25191 - RNA, 20 nt, Artificial Sequence
  spacer sequence CTCN PAM
ccuggccgcccccccuuacc

SEQ ID NO: 25192 - RNA, 20 nt, Artificial Sequence
  spacer sequence CTCN PAM
guguccccccaggccgugua

SEQ ID NO: 25193 - RNA, 20 nt, Artificial Sequence
  spacer sequence CTCN PAM
ucccaggucuccagcguuuc

SEQ ID NO: 25194 - RNA, 20 nt, Artificial Sequence
  spacer sequence CTCN PAM
caggucuccagcguuuccug

SEQ ID NO: 25195 - RNA, 20 nt, Artificial Sequence
  spacer sequence CTCN PAM
agcguuuccuggggagagcg

SEQ ID NO: 25196 - RNA, 20 nt, Artificial Sequence
  spacer sequence CTCN PAM
ccaggaaacgcuggagaccu

SEQ ID NO: 25197 - RNA, 20 nt, Artificial Sequence
  spacer sequence CTCN PAM
ccccaggaaacgcuggagac

SEQ ID NO: 25198 - RNA, 20 nt, Artificial Sequence
  spacer sequence CTCN PAM
cuuuucuaccugccuggucu

SEQ ID NO: 25199 - RNA, 20 nt, Artificial Sequence
  spacer sequence CTCN PAM
ccauggggaugcggcugcgc

SEQ ID NO: 25200 - RNA, 20 nt, Artificial Sequence
  spacer sequence CTCN PAM
agcgcagccgcauccccaug

SEQ ID NO: 25201 - RNA, 20 nt, Artificial Sequence
  spacer sequence CTCN PAM
cagacgccggcugaugcgcu

SEQ ID NO: 25202 - RNA, 20 nt, Artificial Sequence
  spacer sequence CTCN PAM
cgggguguauaggcgggguc

SEQ ID NO: 25203 - RNA, 20 nt, Artificial Sequence
  spacer sequence CTCN PAM
gcaggagugggggaacaagg

SEQ ID NO: 25204 - RNA, 20 nt, Artificial Sequence
  spacer sequence CTCN PAM
ugcagaggaccccgccuaua

SEQ ID NO: 25205 - RNA, 20 nt, Artificial Sequence
  spacer sequence CTCN PAM
ccuccgguccuccccacggc

SEQ ID NO: 25206 - RNA, 20 nt, Artificial Sequence
  spacer sequence CTCN PAM
uccgguccuccccacggcca

SEQ ID NO: 25207 - RNA, 20 nt, Artificial Sequence
  spacer sequence CTCN PAM
gguccuccccacggccaggg

SEQ ID NO: 25208 - RNA, 20 nt, Artificial Sequence
  spacer sequence CTCN PAM
ccacggccagggccccuccu

SEQ ID NO: 25209 - RNA, 20 nt, Artificial Sequence
  spacer sequence CTCN PAM
uccgcgccuugcuccugccc

SEQ ID NO: 25210 - RNA, 20 nt, Artificial Sequence
  spacer sequence CTCN PAM
gcgccuugcuccugcccuca

SEQ ID NO: 25211 - RNA, 20 nt, Artificial Sequence
  spacer sequence CTCN PAM
ugcccucauccuccagguag

SEQ ID NO: 25212 - RNA, 20 nt, Artificial Sequence
  spacer sequence CTCN PAM
uccuccagguagcgaagaac

SEQ ID NO: 25213 - RNA, 20 nt, Artificial Sequence
  spacer sequence CTCN PAM
agguagcgaagaacccgcuc

SEQ ID NO: 25214 - RNA, 20 nt, Artificial Sequence
  spacer sequence CTCN PAM
ugcuccuccccggagcgguu

SEQ ID NO: 25215 - RNA, 20 nt, Artificial Sequence
  spacer sequence CTCN PAM
uccccggagcgguucaugaa

SEQ ID NO: 25216 - RNA, 20 nt, Artificial Sequence
  spacer sequence CTCN PAM
ccggagcgguucaugaaauc

SEQ ID NO: 25217 - RNA, 20 nt, Artificial Sequence
  spacer sequence CTCN PAM
ggggaggagcaggagcgggu

SEQ ID NO: 25218 - RNA, 20 nt, Artificial Sequence
  spacer sequence CTCN PAM
uccaggucuggaacgauuuc

SEQ ID NO: 25219 - RNA, 20 nt, Artificial Sequence
  spacer sequence CTCN PAM
cuuccaggucuggaacgauu

SEQ ID NO: 25220 - RNA, 20 nt, Artificial Sequence
  spacer sequence CTCN PAM
cugccucucuuccaggucug

SEQ ID NO: 25221 - RNA, 20 nt, Artificial Sequence
  spacer sequence CTCN PAM
acacggggaccccggcaguu

SEQ ID NO: 25222 - RNA, 20 nt, Artificial Sequence
  spacer sequence CTCN PAM
cuccacacggggaccccggc

SEQ ID NO: 25223 - RNA, 20 nt, Artificial Sequence
  spacer sequence CTCN PAM
cucccuccacacggggaccc

SEQ ID NO: 25224 - RNA, 20 nt, Artificial Sequence
  spacer sequence CTCN PAM
acauagguggcguuguugca

SEQ ID NO: 25225 - RNA, 20 nt, Artificial Sequence
  spacer sequence CTCN PAM
gcaaagaugccuggugaugc

SEQ ID NO: 25226 - RNA, 20 nt, Artificial Sequence
  spacer sequence CTCN PAM
aggccaggcaggcccccguc

SEQ ID NO: 25227 - RNA, 20 nt, Artificial Sequence
  spacer sequence CTCN PAM
agcagggucaggagguacug

SEQ ID NO: 25228 - RNA, 20 nt, Artificial Sequence
  spacer sequence CTCN PAM
ugacccugcuggagacagac

SEQ ID NO: 25229 - RNA, 20 nt, Artificial Sequence
  spacer sequence CTCN PAM
cugggccgggguggcauuug

SEQ ID NO: 25230 - RNA, 20 nt, Artificial Sequence
  spacer sequence CTCN PAM
gggccgggguggcauuuggg

SEQ ID NO: 25231 - RNA, 20 nt, Artificial Sequence
  spacer sequence CTCN PAM
ugggccuuguagaauggcau

SEQ ID NO: 25232 - RNA, 20 nt, Artificial Sequence
  spacer sequence CTCN PAM
ugggggcuccugggccuugu

SEQ ID NO: 25233 - RNA, 20 nt, Artificial Sequence
  spacer sequence CTCN PAM
cgaccccugcucacuguucu

SEQ ID NO: 25234 - RNA, 20 nt, Artificial Sequence
  spacer sequence CTCN PAM
cuguucuccaggcgcuggag

SEQ ID NO: 25235 - RNA, 20 nt, Artificial Sequence
  spacer sequence CTCN PAM
aggcgcuggaggcucuuccg

SEQ ID NO: 25236 - RNA, 20 nt, Artificial Sequence
  spacer sequence CTCN PAM
agcgccuggagaacagugag

SEQ ID NO: 25237 - RNA, 20 nt, Artificial Sequence
  spacer sequence CTCN PAM
uccgccccuuggccuugggc

SEQ ID NO: 25238 - RNA, 20 nt, Artificial Sequence
  spacer sequence CTCN PAM
ugcccaaggccaaggggcgg

SEQ ID NO: 25239 - RNA, 20 nt, Artificial Sequence
  spacer sequence CTCN PAM
gaccucgugcccaaggccaa

SEQ ID NO: 25240 - RNA, 20 nt, Artificial Sequence
  spacer sequence CTCN PAM
gcuuccaggcggaaacagca

SEQ ID NO: 25241 - RNA, 20 nt, Artificial Sequence
  spacer sequence CTCN PAM
cggcuuccaggcggaaacag

SEQ ID NO: 25242 - RNA, 20 nt, Artificial Sequence
  spacer sequence CTCN PAM
ucaccugggagcuggcuagg

SEQ ID NO: 25243 - RNA, 20 nt, Artificial Sequence
  spacer sequence CTCN PAM
caggugaagagacucucggc

SEQ ID NO: 25244 - RNA, 20 nt, Artificial Sequence
  spacer sequence CTCN PAM
gggucaaggccggccaggau

SEQ ID NO: 25245 - RNA, 20 nt, Artificial Sequence
  spacer sequence CTCN PAM
uggcccuggggacaggggac

SEQ ID NO: 25246 - RNA, 20 nt, Artificial Sequence
  spacer sequence CTCN PAM
uccuggcccuggggacaggg

SEQ ID NO: 25247 - RNA, 20 nt, Artificial Sequence
  spacer sequence CTCN PAM
ccuccuggcccuggggacag

SEQ ID NO: 25248 - RNA, 20 nt, Artificial Sequence
  spacer sequence CTCN PAM
agagcuaaucggccuggccg

SEQ ID NO: 25249 - RNA, 20 nt, Artificial Sequence
  spacer sequence CTCN PAM
ggaggggggccgcugcagcc

SEQ ID NO: 25250 - RNA, 20 nt, Artificial Sequence
  spacer sequence CTCN PAM
ggccaggccgauuagcucug

SEQ ID NO: 25251 - RNA, 20 nt, Artificial Sequence
  spacer sequence CTCN PAM
acaauuaaugccauuugcuc

SEQ ID NO: 25252 - RNA, 20 nt, Artificial Sequence
  spacer sequence CTCN PAM
gcugccacuugcuuguuuuc

SEQ ID NO: 25253 - RNA, 20 nt, Artificial Sequence
  spacer sequence CTCN PAM
uaugauggggaacucacccc

SEQ ID NO: 25254 - RNA, 20 nt, Artificial Sequence
  spacer sequence CTCN PAM
ccccucagccaugccacacu

SEQ ID NO: 25255 - RNA, 20 nt, Artificial Sequence
  spacer sequence CTCN PAM
gccaugccacacugcuuuug

SEQ ID NO: 25256 - RNA, 20 nt, Artificial Sequence
  spacer sequence CTCN PAM
aaacaaaacaaaacaaaaca

SEQ ID NO: 25257 - RNA, 20 nt, Artificial Sequence
  spacer sequence CTCN PAM
aucucaaaacaaaacaaaac

SEQ ID NO: 25258 - RNA, 20 nt, Artificial Sequence
  spacer sequence CTCN PAM
cucuguugcccaggcugcag

SEQ ID NO: 25259 - RNA, 20 nt, Artificial Sequence
  spacer sequence CTCN PAM
guugcccaggcugcagugca

SEQ ID NO: 25260 - RNA, 20 nt, Artificial Sequence
  spacer sequence CTCN PAM
accccagcagcuggacaggg

SEQ ID NO: 25261 - RNA, 20 nt, Artificial Sequence
  spacer sequence CTCN PAM
gaugucacuucuguuaucgg

SEQ ID NO: 25262 - RNA, 20 nt, Artificial Sequence
  spacer sequence CTCN PAM
ccucggaugucacuucuguu

SEQ ID NO: 25263 - RNA, 20 nt, Artificial Sequence
  spacer sequence CTCN PAM
gggaagucagagggggcggg

SEQ ID NO: 25264 - RNA, 20 nt, Artificial Sequence
  spacer sequence CTCN PAM
cccaggaacccacuagagac

SEQ ID NO: 25265 - RNA, 20 nt, Artificial Sequence
  spacer sequence CTCN PAM
aguggguuccugggggaggg

SEQ ID NO: 25266 - RNA, 20 nt, Artificial Sequence
  spacer sequence CTCN PAM
ugcugucucuaguggguucc

SEQ ID NO: 25267 - RNA, 20 nt, Artificial Sequence
  spacer sequence CTCN PAM
cuugcugucucuaguggguu

SEQ ID NO: 25268 - RNA, 20 nt, Artificial Sequence
  spacer sequence CTCN PAM
gggcggaggugacucagccu

SEQ ID NO: 25269 - RNA, 20 nt, Artificial Sequence
  spacer sequence CTCN PAM
gcccugagcccuggcuuccu

SEQ ID NO: 25270 - RNA, 20 nt, Artificial Sequence
  spacer sequence CTCN PAM
gccugggguggggcagacug

SEQ ID NO: 25271 - RNA, 20 nt, Artificial Sequence
  spacer sequence CTCN PAM
ugcuugccagguuuuaaccc

SEQ ID NO: 25272 - RNA, 20 nt, Artificial Sequence
  spacer sequence CTCN PAM
uuuggguaaaucccuacaac

SEQ ID NO: 25273 - RNA, 20 nt, Artificial Sequence
  spacer sequence CTCN PAM
ccuuuggguaaaucccuaca

SEQ ID NO: 25274 - RNA, 20 nt, Artificial Sequence
  spacer sequence CTCN PAM
uugcucuccuuuggguaaau

SEQ ID NO: 25275 - RNA, 20 nt, Artificial Sequence
  spacer sequence CTCN PAM
cggcggccaguggagaggac

SEQ ID NO: 25276 - RNA, 20 nt, Artificial Sequence
  spacer sequence CTCN PAM
cggcccggcucccggcggcc

SEQ ID NO: 25277 - RNA, 20 nt, Artificial Sequence
  spacer sequence CTCN PAM
ucuccgcucugccggcugca

SEQ ID NO: 25278 - RNA, 20 nt, Artificial Sequence
  spacer sequence CTCN PAM
gcucugccggcugcacaugg

SEQ ID NO: 25279 - RNA, 20 nt, Artificial Sequence
  spacer sequence CTCN PAM
gccggcugcacauggccaga

SEQ ID NO: 25280 - RNA, 20 nt, Artificial Sequence
  spacer sequence CTCN PAM
ggccaugugcagccggcaga

SEQ ID NO: 25281 - RNA, 20 nt, Artificial Sequence
  spacer sequence CTCN PAM
cugcccacccaccugugccc

SEQ ID NO: 25282 - RNA, 20 nt, Artificial Sequence
  spacer sequence CTCN PAM
accuacucccugcccaccca

SEQ ID NO: 25283 - RNA, 20 nt, Artificial Sequence
  spacer sequence CTCN PAM
cacugccccgcaggcccugg

SEQ ID NO: 25284 - RNA, 20 nt, Artificial Sequence
  spacer sequence CTCN PAM
ggaagugagcucccugggga

SEQ ID NO: 25285 - RNA, 20 nt, Artificial Sequence
  spacer sequence CTCN PAM
cuuccugagccuggccagaa

SEQ ID NO: 25286 - RNA, 20 nt, Artificial Sequence
  spacer sequence CTCN PAM
cuggggacccaggccccaug

SEQ ID NO: 25287 - RNA, 20 nt, Artificial Sequence
  spacer sequence CTCN PAM
ucugccacccucagagacgg

SEQ ID NO: 25288 - RNA, 20 nt, Artificial Sequence
  spacer sequence CTCN PAM
gccacccucagagacggaga

SEQ ID NO: 25289 - RNA, 20 nt, Artificial Sequence
  spacer sequence CTCN PAM
gagacggagaacgugagagc

SEQ ID NO: 25290 - RNA, 20 nt, Artificial Sequence
  spacer sequence CTCN PAM
gaggguggcagaggaggcug

SEQ ID NO: 25291 - RNA, 20 nt, Artificial Sequence
  spacer sequence CTCN PAM
gucucugaggguggcagagg

SEQ ID NO: 25292 - RNA, 20 nt, Artificial Sequence
  spacer sequence CTCN PAM
cguucuccgucucugagggu

SEQ ID NO: 25293 - RNA, 20 nt, Artificial Sequence
  spacer sequence CTCN PAM
cacguucuccgucucugagg

SEQ ID NO: 25294 - RNA, 20 nt, Artificial Sequence
  spacer sequence CTCN PAM
cggaaggcggguucuuacuu

SEQ ID NO: 25295 - RNA, 20 nt, Artificial Sequence
  spacer sequence CTCN PAM
ucccggaaggcggguucuua

SEQ ID NO: 25296 - RNA, 20 nt, Artificial Sequence
  spacer sequence CTCN PAM
cguccacccagaaccucaag

SEQ ID NO: 25297 - RNA, 20 nt, Artificial Sequence
  spacer sequence CTCN PAM
agaugggacugcauuuggaa

SEQ ID NO: 25298 - RNA, 20 nt, Artificial Sequence
  spacer sequence CTCN PAM
gaagauguuaguuucaguga

SEQ ID NO: 25299 - RNA, 20 nt, Artificial Sequence
  spacer sequence CTCN PAM
cugaaacuaacaucuucaga

SEQ ID NO: 25300 - RNA, 20 nt, Artificial Sequence
  spacer sequence CTCN PAM
aagggggaggucacaccugu

SEQ ID NO: 25301 - RNA, 20 nt, Artificial Sequence
  spacer sequence CTCN PAM
cccuuagaggacaaccgacc

SEQ ID NO: 25302 - RNA, 20 nt, Artificial Sequence
  spacer sequence CTCN PAM
cgucuuggccuuccaaagcg

SEQ ID NO: 25303 - RNA, 20 nt, Artificial Sequence
  spacer sequence CTCN PAM
agcgaaacucccgucuuggc

SEQ ID NO: 25304 - RNA, 20 nt, Artificial Sequence
  spacer sequence CTCN PAM
ugggcucaagcgaaacuccc

SEQ ID NO: 25305 - RNA, 20 nt, Artificial Sequence
  spacer sequence CTCN PAM
agcuccugggcucaagcgaa

SEQ ID NO: 25306 - RNA, 20 nt, Artificial Sequence
  spacer sequence CTCN PAM
gcaacagagugagaccccug

SEQ ID NO: 25307 - RNA, 20 nt, Artificial Sequence
  spacer sequence CTCN PAM
guugcugaggcuggucucaa

SEQ ID NO: 25308 - RNA, 20 nt, Artificial Sequence
  spacer sequence CTCN PAM
cucuguugcugaggcugguc

SEQ ID NO: 25309 - RNA, 20 nt, Artificial Sequence
  spacer sequence CTCN PAM
acacaaauuagcugggugug

SEQ ID NO: 25310 - RNA, 20 nt, Artificial Sequence
  spacer sequence CTCN PAM
ggaggcuaaggcaggaggau

SEQ ID NO: 25311 - RNA, 20 nt, Artificial Sequence
  spacer sequence CTCN PAM
agaguagcugggaccacagg

SEQ ID NO: 25312 - RNA, 20 nt, Artificial Sequence
  spacer sequence CTCN PAM
ugccuuagccuccagaguag

SEQ ID NO: 25313 - RNA, 20 nt, Artificial Sequence
  spacer sequence CTCN PAM
agcaauccuccugccuuagc

SEQ ID NO: 25314 - RNA, 20 nt, Artificial Sequence
  spacer sequence CTCN PAM
acuuccugggcucaagcaau

SEQ ID NO: 25315 - RNA, 20 nt, Artificial Sequence
  spacer sequence CTCN PAM
cuacagccucgacuuccugg

SEQ ID NO: 25316 - RNA, 20 nt, Artificial Sequence
  spacer sequence CTCN PAM
agacugggcgacagggcagg

SEQ ID NO: 25317 - RNA, 20 nt, Artificial Sequence
  spacer sequence CTCN PAM
ugccuguaaucccagcacuu

SEQ ID NO: 25318 - RNA, 20 nt, Artificial Sequence
  spacer sequence CTCN PAM
caaagugcugggauuacagg

SEQ ID NO: 25319 - RNA, 20 nt, Artificial Sequence
  spacer sequence CTCN PAM
gccucccaaagugcugggau

SEQ ID NO: 25320 - RNA, 20 nt, Artificial Sequence
  spacer sequence CTCN PAM
ucggccucccaaagugcugg

SEQ ID NO: 25321 - RNA, 20 nt, Artificial Sequence
  spacer sequence CTCN PAM
aacuucugaccacaggugau

SEQ ID NO: 25322 - RNA, 20 nt, Artificial Sequence
  spacer sequence CTCN PAM
acuaaaaauacaaaauuagc

SEQ ID NO: 25323 - RNA, 20 nt, Artificial Sequence
  spacer sequence CTCN PAM
gcuucccaaguagcugggau

SEQ ID NO: 25324 - RNA, 20 nt, Artificial Sequence
  spacer sequence CTCN PAM
ugccucagcuucccaaguag

SEQ ID NO: 25325 - RNA, 20 nt, Artificial Sequence
  spacer sequence CTCN PAM
uggguucaaacaauucuccu

SEQ ID NO: 25326 - RNA, 20 nt, Artificial Sequence
  spacer sequence CTCN PAM
gccuccuggguucaaacaau

SEQ ID NO: 25327 - RNA, 20 nt, Artificial Sequence
  spacer sequence CTCN PAM
cugcagccuccgccuccugg

SEQ ID NO: 25328 - RNA, 20 nt, Artificial Sequence
  spacer sequence CTCN PAM
gcucacugcagccuccgccu

SEQ ID NO: 25329 - RNA, 20 nt, Artificial Sequence
  spacer sequence CTCN PAM
agccugggugacagagcgag

SEQ ID NO: 25330 - RNA, 20 nt, Artificial Sequence
  spacer sequence CTCN PAM
gucacccaggcuggagugua

SEQ ID NO: 25331 - RNA, 20 nt, Artificial Sequence
  spacer sequence CTCN PAM
cucugucacccaggcuggag

SEQ ID NO: 25332 - RNA, 20 nt, Artificial Sequence
  spacer sequence CTCN PAM
gucucaaaaaaaaaaagaaa

SEQ ID NO: 25333 - RNA, 20 nt, Artificial Sequence
  spacer sequence CTCN PAM
aaaaaaaaaagaaaagaaaa

SEQ ID NO: 25334 - RNA, 20 nt, Artificial Sequence
  spacer sequence CTCN PAM
uuuuucuuuucuuuuuuuuu

SEQ ID NO: 25335 - RNA, 20 nt, Artificial Sequence
  spacer sequence CTCN PAM
cuacguguccguguccaaau

SEQ ID NO: 25336 - RNA, 20 nt, Artificial Sequence
  spacer sequence CTCN PAM
acacagcuaucucccuacgu

SEQ ID NO: 25337 - RNA, 20 nt, Artificial Sequence
  spacer sequence CTCN PAM
gucuccacacagcuaucucc

SEQ ID NO: 25338 - RNA, 20 nt, Artificial Sequence
  spacer sequence CTCN PAM
gccucugucuccacacagcu

SEQ ID NO: 25339 - RNA, 20 nt, Artificial Sequence
  spacer sequence CTCN PAM
agccucugccucugucucca

SEQ ID NO: 25340 - RNA, 20 nt, Artificial Sequence
  spacer sequence CTCN PAM
agguguccuuggcuuguggc

SEQ ID NO: 25341 - RNA, 20 nt, Artificial Sequence
  spacer sequence CTCN PAM
cagcuucugggggcuccagg

SEQ ID NO: 25342 - RNA, 20 nt, Artificial Sequence
  spacer sequence CTCN PAM
cccagcuucugggggcucca

SEQ ID NO: 25343 - RNA, 20 nt, Artificial Sequence
  spacer sequence CTCN PAM
ucucccagcuucugggggcu

SEQ ID NO: 25344 - RNA, 20 nt, Artificial Sequence
  spacer sequence CTCN PAM
ccuggagccccagugacacg

SEQ ID NO: 25345 - RNA, 20 nt, Artificial Sequence
  spacer sequence CTCN PAM
aggggaggguccuucccucc

SEQ ID NO: 25346 - RNA, 20 nt, Artificial Sequence
  spacer sequence CTCN PAM
acaagucugacaucagcgug

SEQ ID NO: 25347 - RNA, 20 nt, Artificial Sequence
  spacer sequence CTCN PAM
ccacaagucugacaucagcg

SEQ ID NO: 25348 - RNA, 20 nt, Artificial Sequence
  spacer sequence CTCN PAM
gcugacguggcaccgugccc

SEQ ID NO: 25349 - RNA, 20 nt, Artificial Sequence
  spacer sequence CTCN PAM
cugggcacacaugugucuga

SEQ ID NO: 25350 - RNA, 20 nt, Artificial Sequence
  spacer sequence CTCN PAM
gacacaugugugcccaggga

SEQ ID NO: 25351 - RNA, 20 nt, Artificial Sequence
  spacer sequence CTCN PAM
guaagugcccaugaaagggu

SEQ ID NO: 25352 - RNA, 20 nt, Artificial Sequence
  spacer sequence CTCN PAM
caugggcacuuacggggcac

SEQ ID NO: 25353 - RNA, 20 nt, Artificial Sequence
  spacer sequence CTCN PAM
ugggcacuuacggggcaccu

SEQ ID NO: 25354 - RNA, 20 nt, Artificial Sequence
  spacer sequence CTCN PAM
caugggcacuuacggggcac

SEQ ID NO: 25355 - RNA, 20 nt, Artificial Sequence
  spacer sequence CTCN PAM
ugggcacuuacggggcaccu

SEQ ID NO: 25356 - RNA, 20 nt, Artificial Sequence
  spacer sequence CTCN PAM
caugggcacuuauggggcac

SEQ ID NO: 25357 - RNA, 20 nt, Artificial Sequence
  spacer sequence CTCN PAM
ugggcacuuauggggcaccu

SEQ ID NO: 25358 - RNA, 20 nt, Artificial Sequence
  spacer sequence CTCN PAM
caugggcacuuacggggcau

SEQ ID NO: 25359 - RNA, 20 nt, Artificial Sequence
  spacer sequence CTCN PAM
ugggcacuuacggggcaucu

SEQ ID NO: 25360 - RNA, 20 nt, Artificial Sequence
  spacer sequence CTCN PAM
caugggcaccuacaggguac

SEQ ID NO: 25361 - RNA, 20 nt, Artificial Sequence
  spacer sequence CTCN PAM
ugggcaccuacaggguaccu

SEQ ID NO: 25362 - RNA, 20 nt, Artificial Sequence
  spacer sequence CTCN PAM
caugggcacuuacggggcac

SEQ ID NO: 25363 - RNA, 20 nt, Artificial Sequence
  spacer sequence CTCN PAM
ugggcacuuacggggcaccu

SEQ ID NO: 25364 - RNA, 20 nt, Artificial Sequence
  spacer sequence CTCN PAM
ugccgccggcacuggagucc

SEQ ID NO: 25365 - RNA, 20 nt, Artificial Sequence
  spacer sequence CTCN PAM
agugccggcggcaggagcuu

SEQ ID NO: 25366 - RNA, 20 nt, Artificial Sequence
  spacer sequence CTCN PAM
accgcgcugccgacgucagg

SEQ ID NO: 25367 - RNA, 20 nt, Artificial Sequence
  spacer sequence CTCN PAM
ccguuaucucccaggcgugu

SEQ ID NO: 25368 - RNA, 20 nt, Artificial Sequence
  spacer sequence CTCN PAM
caggcgugucugcuccccgu

SEQ ID NO: 25369 - RNA, 20 nt, Artificial Sequence
  spacer sequence CTCN PAM
ccgugugucuggcugcaggg

SEQ ID NO: 25370 - RNA, 20 nt, Artificial Sequence
  spacer sequence CTCN PAM
cacgcagacacacacacaca

SEQ ID NO: 25371 - RNA, 20 nt, Artificial Sequence
  spacer sequence CTCN PAM
gugcagccacacagccagac

SEQ ID NO: 25372 - RNA, 20 nt, Artificial Sequence
  spacer sequence CTCN PAM
uacccagacaggccuccgug

SEQ ID NO: 25373 - RNA, 20 nt, Artificial Sequence
  spacer sequence CTCN PAM
gccccguugcuucggucgau

SEQ ID NO: 25374 - RNA, 20 nt, Artificial Sequence
  spacer sequence CTCN PAM
ggggcaccacgcucacugcu

SEQ ID NO: 25375 - RNA, 20 nt, Artificial Sequence
  spacer sequence CTCN PAM
cugcuacaaaugugggucuu

SEQ ID NO: 25376 - RNA, 20 nt, Artificial Sequence
  spacer sequence CTCN PAM
cuugcccggaagacccacau

SEQ ID NO: 25377 - RNA, 20 nt, Artificial Sequence
  spacer sequence CTCN PAM
cagggccggggucggggguc

SEQ ID NO: 25378 - RNA, 20 nt, Artificial Sequence
  spacer sequence CTCN PAM
uucauugucugguuuucggg

SEQ ID NO: 25379 - RNA, 20 nt, Artificial Sequence
  spacer sequence CTCN PAM
aaauccacccccgaaaacca

SEQ ID NO: 25380 - RNA, 20 nt, Artificial Sequence
  spacer sequence CTCN PAM
ugcugucacccaggcuggag

SEQ ID NO: 25381 - RNA, 20 nt, Artificial Sequence
  spacer sequence CTCN PAM
agccugggugacagcacgag

SEQ ID NO: 25382 - RNA, 20 nt, Artificial Sequence
  spacer sequence CTCN PAM
cugcagccucgaccucccgg

SEQ ID NO: 25383 - RNA, 20 nt, Artificial Sequence
  spacer sequence CTCN PAM
accucccgggcuccggugau

SEQ ID NO: 25384 - RNA, 20 nt, Artificial Sequence
  spacer sequence CTCN PAM
cgggcuccggugaucuuccc

SEQ ID NO: 25385 - RNA, 20 nt, Artificial Sequence
  spacer sequence CTCN PAM
ggugaucuucccgugucagc

SEQ ID NO: 25386 - RNA, 20 nt, Artificial Sequence
  spacer sequence CTCN PAM
ugaguagcugggaccacaga

SEQ ID NO: 25387 - RNA, 20 nt, Artificial Sequence
  spacer sequence CTCN PAM
ggaggcugacacgggaagau

SEQ ID NO: 25388 - RNA, 20 nt, Artificial Sequence
  spacer sequence CTCN PAM
ccaccacacccggcuaacuu

SEQ ID NO: 25389 - RNA, 20 nt, Artificial Sequence
  spacer sequence CTCN PAM
aaaaaauaaaaugaaguuag

SEQ ID NO: 25390 - RNA, 20 nt, Artificial Sequence
  spacer sequence CTCN PAM
ugagcucuuaggggagccgg

SEQ ID NO: 25391 - RNA, 20 nt, Artificial Sequence
  spacer sequence CTCN PAM
ggaguucagccugggcaacg

SEQ ID NO: 25392 - RNA, 20 nt, Artificial Sequence
  spacer sequence CTCN PAM
uaggggagccgggauguccc

SEQ ID NO: 25393 - RNA, 20 nt, Artificial Sequence
  spacer sequence CTCN PAM
ccuaagagcucaggaguuca

SEQ ID NO: 25394 - RNA, 20 nt, Artificial Sequence
  spacer sequence CTCN PAM
cugucuccaucucuucuuuc

SEQ ID NO: 25395 - RNA, 20 nt, Artificial Sequence
  spacer sequence CTCN PAM
gucuccaucucuucuuucuc

SEQ ID NO: 25396 - RNA, 20 nt, Artificial Sequence
  spacer sequence CTCN PAM
aucucuucuuucuccucucc

SEQ ID NO: 25397 - RNA, 20 nt, Artificial Sequence
  spacer sequence CTCN PAM
ucuuucuccucuccccucuc

SEQ ID NO: 25398 - RNA, 20 nt, Artificial Sequence
  spacer sequence CTCN PAM
ucuccccucucccugucucu

SEQ ID NO: 25399 - RNA, 20 nt, Artificial Sequence
  spacer sequence CTCN PAM
ccccucucccugucucugcc

SEQ ID NO: 25400 - RNA, 20 nt, Artificial Sequence
  spacer sequence CTCN PAM
ccucucccugucucugccac

SEQ ID NO: 25401 - RNA, 20 nt, Artificial Sequence
  spacer sequence CTCN PAM
cccugucucugccacccgcc

SEQ ID NO: 25402 - RNA, 20 nt, Artificial Sequence
  spacer sequence CTCN PAM
cugucucugccacccgcccc

SEQ ID NO: 25403 - RNA, 20 nt, Artificial Sequence
  spacer sequence CTCN PAM
gccacccgccccgucccuuc

SEQ ID NO: 25404 - RNA, 20 nt, Artificial Sequence
  spacer sequence CTCN PAM
cggaaaaauggccgucaggg

SEQ ID NO: 25405 - RNA, 20 nt, Artificial Sequence
  spacer sequence CTCN PAM
gcccuagcuggcgcccugcc

SEQ ID NO: 25406 - RNA, 20 nt, Artificial Sequence
  spacer sequence CTCN PAM
guuggccacaugcccaucuc

SEQ ID NO: 25407 - RNA, 20 nt, Artificial Sequence
  spacer sequence CTCN PAM
ugggggcccuuggaccuggu

SEQ ID NO: 25408 - RNA, 20 nt, Artificial Sequence
  spacer sequence CTCN PAM
gugguuauucauugcuuuaa

SEQ ID NO: 25409 - RNA, 20 nt, Artificial Sequence
  spacer sequence CTCN PAM
ccccagguggcauuaaagca

SEQ ID NO: 25410 - RNA, 20 nt, Artificial Sequence
  spacer sequence CTCN PAM
ccccccagguggcauuaaag

SEQ ID NO: 25411 - RNA, 20 nt, Artificial Sequence
  spacer sequence CTCN PAM
cuccccccagguggcauuaa

SEQ ID NO: 25412 - RNA, 20 nt, Artificial Sequence
  spacer sequence CTCN PAM
gcauguuggugugcccaggc

SEQ ID NO: 25413 - RNA, 20 nt, Artificial Sequence
  spacer sequence CTCN PAM
gcccgaccugggccuggugc

SEQ ID NO: 25414 - RNA, 20 nt, Artificial Sequence
  spacer sequence CTCN PAM
uccucucggccucaguuucc

SEQ ID NO: 25415 - RNA, 20 nt, Artificial Sequence
  spacer sequence CTCN PAM
ucucggccucaguuuccccg

SEQ ID NO: 25416 - RNA, 20 nt, Artificial Sequence
  spacer sequence CTCN PAM
cggccucaguuuccccgccc

SEQ ID NO: 25417 - RNA, 20 nt, Artificial Sequence
  spacer sequence CTCN PAM
gccucaguuuccccgcccgu

SEQ ID NO: 25418 - RNA, 20 nt, Artificial Sequence
  spacer sequence CTCN PAM
guuuccccgcccguaagacg

SEQ ID NO: 25419 - RNA, 20 nt, Artificial Sequence
  spacer sequence CTCN PAM
uucugauaccauccccgucu

SEQ ID NO: 25420 - RNA, 20 nt, Artificial Sequence
  spacer sequence CTCN PAM
ugugacuuuguuuucauccu

SEQ ID NO: 25421 - RNA, 20 nt, Artificial Sequence
  spacer sequence CTCN PAM
uguaacuccuguagagaggg

SEQ ID NO: 25422 - RNA, 20 nt, Artificial Sequence
  spacer sequence CTCN PAM
uguagagaggggacggcgug

SEQ ID NO: 25423 - RNA, 20 nt, Artificial Sequence
  spacer sequence CTCN PAM
acaggaguuacaggagaaac

SEQ ID NO: 25424 - RNA, 20 nt, Artificial Sequence
  spacer sequence CTCN PAM
cuacaggaguuacaggagaa

SEQ ID NO: 25425 - RNA, 20 nt, Artificial Sequence
  spacer sequence CTCN PAM
gucugcucccuagcggggag

SEQ ID NO: 25426 - RNA, 20 nt, Artificial Sequence
  spacer sequence CTCN PAM
cuagcggggagguguccagg

SEQ ID NO: 25427 - RNA, 20 nt, Artificial Sequence
  spacer sequence CTCN PAM
ccgcuagggagcagacggag

SEQ ID NO: 25428 - RNA, 20 nt, Artificial Sequence
  spacer sequence CTCN PAM
gucugcucccugcagcgggu

SEQ ID NO: 25429 - RNA, 20 nt, Artificial Sequence
  spacer sequence CTCN PAM
cugcagcgggugggauggug

SEQ ID NO: 25430 - RNA, 20 nt, Artificial Sequence
  spacer sequence CTCN PAM
agggacaccccaccauccca

SEQ ID NO: 25431 - RNA, 20 nt, Artificial Sequence
  spacer sequence CTCN PAM
gcccgcuccagggacacccc

SEQ ID NO: 25432 - RNA, 20 nt, Artificial Sequence
  spacer sequence CTCN PAM
aggcucugcccgcuccaggg

SEQ ID NO: 25433 - RNA, 20 nt, Artificial Sequence
  spacer sequence CTCN PAM
uccgaggcugcugcccaugg

SEQ ID NO: 25434 - RNA, 20 nt, Artificial Sequence
  spacer sequence CTCN PAM
gaggcugcugcccaugguag

SEQ ID NO: 25435 - RNA, 20 nt, Artificial Sequence
  spacer sequence CTCN PAM
gaggagucacucaaggcucu

SEQ ID NO: 25436 - RNA, 20 nt, Artificial Sequence
  spacer sequence CTCN PAM
gccuggggucuggcagaagc

SEQ ID NO: 25437 - RNA, 20 nt, Artificial Sequence
  spacer sequence CTCN PAM
ggccagguguaccccaaggg

SEQ ID NO: 25438 - RNA, 20 nt, Artificial Sequence
  spacer sequence CTCN PAM
ggguccggggucccuugggg

SEQ ID NO: 25439 - RNA, 20 nt, Artificial Sequence
  spacer sequence CTCN PAM
cuggugggcucaggguccgg

SEQ ID NO: 25440 - RNA, 20 nt, Artificial Sequence
  spacer sequence CTCN PAM
ugacucuagggugggaggug

SEQ ID NO: 25441 - RNA, 20 nt, Artificial Sequence
  spacer sequence CTCN PAM
agggugggagguggaagcag

SEQ ID NO: 25442 - RNA, 20 nt, Artificial Sequence
  spacer sequence CTCN PAM
cacccuagagucaagaggaa

SEQ ID NO: 25443 - RNA, 20 nt, Artificial Sequence
  spacer sequence CTCN PAM
aggcaggcccgugucccauu

SEQ ID NO: 25444 - RNA, 20 nt, Artificial Sequence
  spacer sequence CTCN PAM
ugcugcuggugcugggcugc

SEQ ID NO: 25445 - RNA, 20 nt, Artificial Sequence
  spacer sequence CTCN PAM
gaacagaaacgcagcccagc

SEQ ID NO: 25446 - RNA, 20 nt, Artificial Sequence
  spacer sequence CTCN PAM
cagcccagguucucugaaca

SEQ ID NO: 25447 - RNA, 20 nt, Artificial Sequence
  spacer sequence CTCN PAM
caccaggugccucuuuccaa

SEQ ID NO: 25448 - RNA, 20 nt, Artificial Sequence
  spacer sequence CTCN PAM
uuccaaauggacacuccugc

SEQ ID NO: 25449 - RNA, 20 nt, Artificial Sequence
  spacer sequence CTCN PAM
ugcugggcaugacacuucug

SEQ ID NO: 25450 - RNA, 20 nt, Artificial Sequence
  spacer sequence CTCN PAM
gaagugucaugcccagcagg

SEQ ID NO: 25451 - RNA, 20 nt, Artificial Sequence
  spacer sequence CTCN PAM
guccugggguucccugcaga

SEQ ID NO: 25452 - RNA, 20 nt, Artificial Sequence
  spacer sequence CTCN PAM
gcaauuaacuccguccuggg

SEQ ID NO: 25453 - RNA, 20 nt, Artificial Sequence
  spacer sequence CTCN PAM
gggcaaagugcuuggacccu

SEQ ID NO: 25454 - RNA, 20 nt, Artificial Sequence
  spacer sequence CTCN PAM
gagcccauuucucagcaggg

SEQ ID NO: 25455 - RNA, 20 nt, Artificial Sequence
  spacer sequence CTCN PAM
gaguaaccgcaggguccaag

SEQ ID NO: 25456 - RNA, 20 nt, Artificial Sequence
  spacer sequence CTCN PAM
gcagggaaaaaugaggcucg

SEQ ID NO: 25457 - RNA, 20 nt, Artificial Sequence
  spacer sequence CTCN PAM
uuuuucccugcugagaaaug

SEQ ID NO: 25458 - RNA, 20 nt, Artificial Sequence
  spacer sequence CTCN PAM
cggaggcaggggcccggcgu

SEQ ID NO: 25459 - RNA, 20 nt, Artificial Sequence
  spacer sequence CTCN PAM
gcgagccucauuuuucccug

SEQ ID NO: 25460 - RNA, 20 nt, Artificial Sequence
  spacer sequence CTCN PAM
caccuggacgccgggccccu

SEQ ID NO: 25461 - RNA, 20 nt, Artificial Sequence
  spacer sequence CTCN PAM
ugcucccaccuggacgccgg

SEQ ID NO: 25462 - RNA, 20 nt, Artificial Sequence
  spacer sequence CTCN PAM
acgcggccggggcguucugu

SEQ ID NO: 25463 - RNA, 20 nt, Artificial Sequence
  spacer sequence CTCN PAM
cccaggcagugacgaaccug

SEQ ID NO: 25464 - RNA, 20 nt, Artificial Sequence
  spacer sequence CTCN PAM
ucccccaggcagugacgaac

SEQ ID NO: 25465 - RNA, 20 nt, Artificial Sequence
  spacer sequence CTCN PAM
uaaauaaauacauaaauaaa

SEQ ID NO: 25466 - RNA, 20 nt, Artificial Sequence
  spacer sequence CTCN PAM
gucucauaaauaaauacaua

SEQ ID NO: 25467 - RNA, 20 nt, Artificial Sequence
  spacer sequence CTCN PAM
agccugggugacaaagcaag

SEQ ID NO: 25468 - RNA, 20 nt, Artificial Sequence
  spacer sequence CTCN PAM
cugcaagcuccgccucccgg

SEQ ID NO: 25469 - RNA, 20 nt, Artificial Sequence
  spacer sequence CTCN PAM
gccucccggguucaagcgau

SEQ ID NO: 25470 - RNA, 20 nt, Artificial Sequence
  spacer sequence CTCN PAM
cggguucaagcgauucuccu

SEQ ID NO: 25471 - RNA, 20 nt, Artificial Sequence
  spacer sequence CTCN PAM
ugccuuagccucccgaguag

SEQ ID NO: 25472 - RNA, 20 nt, Artificial Sequence
  spacer sequence CTCN PAM
cgaguagcugggauuacaag

SEQ ID NO: 25473 - RNA, 20 nt, Artificial Sequence
  spacer sequence CTCN PAM
ggaggcuaaggcaggagaau

SEQ ID NO: 25474 - RNA, 20 nt, Artificial Sequence
  spacer sequence CTCN PAM
aaaaaaaaaaaaaaaaaaaa

SEQ ID NO: 25475 - RNA, 20 nt, Artificial Sequence
  spacer sequence CTCN PAM
gucucaaaaaaaaaaaaaaa

SEQ ID NO: 25476 - RNA, 20 nt, Artificial Sequence
  spacer sequence CTCN PAM
cugucucccaggcuagagug

SEQ ID NO: 25477 - RNA, 20 nt, Artificial Sequence
  spacer sequence CTCN PAM
caggcuagagugcggugucg

SEQ ID NO: 25478 - RNA, 20 nt, Artificial Sequence
  spacer sequence CTCN PAM
agccugggagacagugagac

SEQ ID NO: 25479 - RNA, 20 nt, Artificial Sequence
  spacer sequence CTCN PAM
cugcaagcuccgccucccgg

SEQ ID NO: 25480 - RNA, 20 nt, Artificial Sequence
  spacer sequence CTCN PAM
gccucccggguucacgccau

SEQ ID NO: 25481 - RNA, 20 nt, Artificial Sequence
  spacer sequence CTCN PAM
cggguucacgccauuuuccu

SEQ ID NO: 25482 - RNA, 20 nt, Artificial Sequence
  spacer sequence CTCN PAM
gccucccgaguagcugggac

SEQ ID NO: 25483 - RNA, 20 nt, Artificial Sequence
  spacer sequence CTCN PAM
cgaguagcugggacuacagg

SEQ ID NO: 25484 - RNA, 20 nt, Artificial Sequence
  spacer sequence CTCN PAM
ggaggcugaggcaggaaaau

SEQ ID NO: 25485 - RNA, 20 nt, Artificial Sequence
  spacer sequence CTCN PAM
acuaaaaauacaaaaauuag

SEQ ID NO: 25486 - RNA, 20 nt, Artificial Sequence
  spacer sequence CTCN PAM
agcuccugaccucaagugau

SEQ ID NO: 25487 - RNA, 20 nt, Artificial Sequence
  spacer sequence CTCN PAM
ugaccucaagugauccgccu

SEQ ID NO: 25488 - RNA, 20 nt, Artificial Sequence
  spacer sequence CTCN PAM
agugauccgccugccucggc

SEQ ID NO: 25489 - RNA, 20 nt, Artificial Sequence
  spacer sequence CTCN PAM
gccucccaaagugcugggau

SEQ ID NO: 25490 - RNA, 20 nt, Artificial Sequence
  spacer sequence CTCN PAM
caaagugcugggauuacagg

SEQ ID NO: 25491 - RNA, 20 nt, Artificial Sequence
  spacer sequence CTCN PAM
cgccuguaaucccagcacuu

SEQ ID NO: 25492 - RNA, 20 nt, Artificial Sequence
  spacer sequence CTCN PAM
cucuguugcccaggcuggag

SEQ ID NO: 25493 - RNA, 20 nt, Artificial Sequence
  spacer sequence CTCN PAM
guugcccaggcuggagugca

SEQ ID NO: 25494 - RNA, 20 nt, Artificial Sequence
  spacer sequence CTCN PAM
agccugggcaacagagggag

SEQ ID NO: 25495 - RNA, 20 nt, Artificial Sequence
  spacer sequence CTCN PAM
gcucacugcagccucgagcu

SEQ ID NO: 25496 - RNA, 20 nt, Artificial Sequence
  spacer sequence CTCN PAM
cugcagccucgagcuccugg

SEQ ID NO: 25497 - RNA, 20 nt, Artificial Sequence
  spacer sequence CTCN PAM
agcuccugggcucacgugau

SEQ ID NO: 25498 - RNA, 20 nt, Artificial Sequence
  spacer sequence CTCN PAM
aggcugcagugagccgagau

SEQ ID NO: 25499 - RNA, 20 nt, Artificial Sequence
  spacer sequence CTCN PAM
ugggcucacgugauccuccu

SEQ ID NO: 25500 - RNA, 20 nt, Artificial Sequence
  spacer sequence CTCN PAM
cgugauccuccugccucagc

SEQ ID NO: 25501 - RNA, 20 nt, Artificial Sequence
  spacer sequence CTCN PAM
ugccucagcccccugaguag

SEQ ID NO: 25502 - RNA, 20 nt, Artificial Sequence
  spacer sequence CTCN PAM
gcccccugaguagcugggau

SEQ ID NO: 25503 - RNA, 20 nt, Artificial Sequence
  spacer sequence CTCN PAM
gggggcugaggcaggaggau

SEQ ID NO: 25504 - RNA, 20 nt, Artificial Sequence
  spacer sequence CTCN PAM
aacuccugggcucgagcagu

SEQ ID NO: 25505 - RNA, 20 nt, Artificial Sequence
  spacer sequence CTCN PAM
ugggcucgagcagucugccc

SEQ ID NO: 25506 - RNA, 20 nt, Artificial Sequence
  spacer sequence CTCN PAM
agcagucugcccaccucggc

SEQ ID NO: 25507 - RNA, 20 nt, Artificial Sequence
  spacer sequence CTCN PAM
agcccaggaguuugagaccc

SEQ ID NO: 25508 - RNA, 20 nt, Artificial Sequence
  spacer sequence CTCN PAM
gccucccacagugcugggau

SEQ ID NO: 25509 - RNA, 20 nt, Artificial Sequence
  spacer sequence CTCN PAM
cacagugcugggaucaaagg

SEQ ID NO: 25510 - RNA, 20 nt, Artificial Sequence
  spacer sequence CTCN PAM
caccuuugaucccagcacug

SEQ ID NO: 25511 - RNA, 20 nt, Artificial Sequence
  spacer sequence CTCN PAM
gugugggcugggcacagugg

SEQ ID NO: 25512 - RNA, 20 nt, Artificial Sequence
  spacer sequence CTCN PAM
aucugccaggaaacccguuu

SEQ ID NO: 25513 - RNA, 20 nt, Artificial Sequence
  spacer sequence CTCN PAM
gcggagacucuauuagggac

SEQ ID NO: 25514 - RNA, 20 nt, Artificial Sequence
  spacer sequence CTCN PAM
gccgagggcacuggccuuaa

SEQ ID NO: 25515 - RNA, 20 nt, Artificial Sequence
  spacer sequence CTCN PAM
auuagggacugcgggcccca

SEQ ID NO: 25516 - RNA, 20 nt, Artificial Sequence
  spacer sequence CTCN PAM
ccgccauggggcugccuccu

SEQ ID NO: 25517 - RNA, 20 nt, Artificial Sequence
  spacer sequence CTCN PAM
ugccuccucugcaccaacuu

SEQ ID NO: 25518 - RNA, 20 nt, Artificial Sequence
  spacer sequence CTCN PAM
ucugcaccaacuuucuggaa

SEQ ID NO: 25519 - RNA, 20 nt, Artificial Sequence
  spacer sequence CTCN PAM
gcaccaacuuucuggaagug

SEQ ID NO: 25520 - RNA, 20 nt, Artificial Sequence
  spacer sequence CTCN PAM
gcaccaggccugucgcugcc

SEQ ID NO: 25521 - RNA, 20 nt, Artificial Sequence
  spacer sequence CTCN PAM
ugggccucaguuuccccaac

SEQ ID NO: 25522 - RNA, 20 nt, Artificial Sequence
  spacer sequence CTCN PAM
guuuccccaacugugaaacg

SEQ ID NO: 25523 - RNA, 20 nt, Artificial Sequence
  spacer sequence CTCN PAM
ucccugagcaagggacuccc

SEQ ID NO: 25524 - RNA, 20 nt, Artificial Sequence
  spacer sequence CTCN PAM
cugagcaagggacuccccca

SEQ ID NO: 25525 - RNA, 20 nt, Artificial Sequence
  spacer sequence CTCN PAM
gggaggagacgcugaccggc

SEQ ID NO: 25526 - RNA, 20 nt, Artificial Sequence
  spacer sequence CTCN PAM
cccauccaugucucagcccc

SEQ ID NO: 25527 - RNA, 20 nt, Artificial Sequence
  spacer sequence CTCN PAM
gcccccacccagaugccccg

SEQ ID NO: 25528 - RNA, 20 nt, Artificial Sequence
  spacer sequence CTCN PAM
ucugugaaacggucccgggg

SEQ ID NO: 25529 - RNA, 20 nt, Artificial Sequence
  spacer sequence CTCN PAM
gucuucucaucugugaaacg

SEQ ID NO: 25530 - RNA, 20 nt, Artificial Sequence
  spacer sequence CTCN PAM
cgugacgggcccuucgugcg

SEQ ID NO: 25531 - RNA, 20 nt, Artificial Sequence
  spacer sequence CTCN PAM
uucucccgugacgggcccuu

SEQ ID NO: 25532 - RNA, 20 nt, Artificial Sequence
  spacer sequence CTCN PAM
ucauucucccgugacgggcc

SEQ ID NO: 25533 - RNA, 20 nt, Artificial Sequence
  spacer sequence CTCN PAM
cccggaaucucgugaucugg

SEQ ID NO: 25534 - RNA, 20 nt, Artificial Sequence
  spacer sequence CTCN PAM
ugaucuggaaauccacagag

SEQ ID NO: 25535 - RNA, 20 nt, Artificial Sequence
  spacer sequence CTCN PAM
guggauuuccagaucacgag

SEQ ID NO: 25536 - RNA, 20 nt, Artificial Sequence
  spacer sequence CTCN PAM
agaaaugacaaugaagcgcg

SEQ ID NO: 25537 - RNA, 20 nt, Artificial Sequence
  spacer sequence CTCN PAM
ccagaaaugacaaugaagcg

SEQ ID NO: 25538 - RNA, 20 nt, Artificial Sequence
  spacer sequence CTCN PAM
ggaaauacacagcgccgcac

SEQ ID NO: 25539 - RNA, 20 nt, Artificial Sequence
  spacer sequence CTCN PAM
cuggaaauacacagcgccgc

SEQ ID NO: 25540 - RNA, 20 nt, Artificial Sequence
  spacer sequence CTCN PAM
gggcccaucagggccggggg

SEQ ID NO: 25541 - RNA, 20 nt, Artificial Sequence
  spacer sequence CTCN PAM
cccggcccugaugggccccg

SEQ ID NO: 25542 - RNA, 20 nt, Artificial Sequence
  spacer sequence CTCN PAM
acucccccggcccugauggg

SEQ ID NO: 25543 - RNA, 20 nt, Artificial Sequence
  spacer sequence CTCN PAM
cagcaucugcauccgccgag

SEQ ID NO: 25544 - RNA, 20 nt, Artificial Sequence
  spacer sequence CTCN PAM
gcaucugcauccgccgaggc

SEQ ID NO: 25545 - RNA, 20 nt, Artificial Sequence
  spacer sequence CTCN PAM
gcggaugcagaugcugagag

SEQ ID NO: 25546 - RNA, 20 nt, Artificial Sequence
  spacer sequence CTCN PAM
uggcuuaggcaggcggggga

SEQ ID NO: 25547 - RNA, 20 nt, Artificial Sequence
  spacer sequence CTCN PAM
cccgccugccuaagccacga

SEQ ID NO: 25548 - RNA, 20 nt, Artificial Sequence
  spacer sequence CTCN PAM
ugcaccugaccagccggggg

SEQ ID NO: 25549 - RNA, 20 nt, Artificial Sequence
  spacer sequence CTCN PAM
ucgugcaccugaccagccgg

SEQ ID NO: 25550 - RNA, 20 nt, Artificial Sequence
  spacer sequence CTCN PAM
gccuggccauggguugcucc

SEQ ID NO: 25551 - RNA, 20 nt, Artificial Sequence
  spacer sequence CTCN PAM
gggcucugccuggccauggg

SEQ ID NO: 25552 - RNA, 20 nt, Artificial Sequence
  spacer sequence CTCN PAM
cugggcucugccuggccaug

SEQ ID NO: 25553 - RNA, 20 nt, Artificial Sequence
  spacer sequence CTCN PAM
ggcccuuccccgcccucucu

SEQ ID NO: 25554 - RNA, 20 nt, Artificial Sequence
  spacer sequence CTCN PAM
cccgacccaucaguccaggu

SEQ ID NO: 25555 - RNA, 20 nt, Artificial Sequence
  spacer sequence CTCN PAM
uccuccugcucccugaaccg

SEQ ID NO: 25556 - RNA, 20 nt, Artificial Sequence
  spacer sequence CTCN PAM
ugcucccugaaccgggaagu

SEQ ID NO: 25557 - RNA, 20 nt, Artificial Sequence
  spacer sequence CTCN PAM
cugaaccgggaaguccgggc

SEQ ID NO: 25558 - RNA, 20 nt, Artificial Sequence
  spacer sequence CTCN PAM
ccagcauacaagauagucca

SEQ ID NO: 25559 - RNA, 20 nt, Artificial Sequence
  spacer sequence CTCN PAM
uguguguccuggacuaucuu

SEQ ID NO: 25560 - RNA, 20 nt, Artificial Sequence
  spacer sequence CTCN PAM
auaauggcugcagagugccc

SEQ ID NO: 25561 - RNA, 20 nt, Artificial Sequence
  spacer sequence CTCN PAM
gcagccauuauugagcaccu

SEQ ID NO: 25562 - RNA, 20 nt, Artificial Sequence
  spacer sequence CTCN PAM
gcucugcugccucugucagu

SEQ ID NO: 25563 - RNA, 20 nt, Artificial Sequence
  spacer sequence CTCN PAM
gcugccucugucaguccugg

SEQ ID NO: 25564 - RNA, 20 nt, Artificial Sequence
  spacer sequence CTCN PAM
gucaguccugggaguuuccg

SEQ ID NO: 25565 - RNA, 20 nt, Artificial Sequence
  spacer sequence CTCN PAM
caggacugacagaggcagca

SEQ ID NO: 25566 - RNA, 20 nt, Artificial Sequence
  spacer sequence CTCN PAM
cuguuuuucccgucccggaa

SEQ ID NO: 25567 - RNA, 20 nt, Artificial Sequence
  spacer sequence CTCN PAM
cggggccgcgguccugcggg

SEQ ID NO: 25568 - RNA, 20 nt, Artificial Sequence
  spacer sequence CTCN PAM
guuuacccauggugggggug

SEQ ID NO: 25569 - RNA, 20 nt, Artificial Sequence
  spacer sequence CTCN PAM
gggccucaguuuacccaugg

SEQ ID NO: 25570 - RNA, 20 nt, Artificial Sequence
  spacer sequence CTCN PAM
cgccccagucugcccauucu

SEQ ID NO: 25571 - RNA, 20 nt, Artificial Sequence
  spacer sequence CTCN PAM
agguccuccagguccuccug

SEQ ID NO: 25572 - RNA, 20 nt, Artificial Sequence
  spacer sequence CTCN PAM
agguccuccugccccccgug

SEQ ID NO: 25573 - RNA, 20 nt, Artificial Sequence
  spacer sequence CTCN PAM
ugccccccgugcccuccucc

SEQ ID NO: 25574 - RNA, 20 nt, Artificial Sequence
  spacer sequence CTCN PAM
ucccgccugcagccccaggc

SEQ ID NO: 25575 - RNA, 20 nt, Artificial Sequence
  spacer sequence CTCN PAM
cgccugcagccccaggcucu

SEQ ID NO: 25576 - RNA, 20 nt, Artificial Sequence
  spacer sequence CTCN PAM
gcuccgucuucauuccuucu

SEQ ID NO: 25577 - RNA, 20 nt, Artificial Sequence
  spacer sequence CTCN PAM
gucuucauuccuucuucauu

SEQ ID NO: 25578 - RNA, 20 nt, Artificial Sequence
  spacer sequence CTCN PAM
ucuguccagcuguucauucc

SEQ ID NO: 25579 - RNA, 20 nt, Artificial Sequence
  spacer sequence CTCN PAM
ggacucuguggggaggggac

SEQ ID NO: 25580 - RNA, 20 nt, Artificial Sequence
  spacer sequence CTCN PAM
guggggaggggacgagggau

SEQ ID NO: 25581 - RNA, 20 nt, Artificial Sequence
  spacer sequence CTCN PAM
ccacagaguccagaggccag

SEQ ID NO: 25582 - RNA, 20 nt, Artificial Sequence
  spacer sequence CTCN PAM
uccccuccccacagagucca

SEQ ID NO: 25583 - RNA, 20 nt, Artificial Sequence
  spacer sequence CTCN PAM
ucccucguccccuccccaca

SEQ ID NO: 25584 - RNA, 20 nt, Artificial Sequence
  spacer sequence CTCN PAM
aggccucaucccucgucccc

SEQ ID NO: 25585 - RNA, 20 nt, Artificial Sequence
  spacer sequence CTCN PAM
aaaaaaaaaaaaaaaaaaaa

SEQ ID NO: 25586 - RNA, 20 nt, Artificial Sequence
  spacer sequence CTCN PAM
gucgcccaggcuggagugca

SEQ ID NO: 25587 - RNA, 20 nt, Artificial Sequence
  spacer sequence CTCN PAM
agccugggcgacagagugaa

SEQ ID NO: 25588 - RNA, 20 nt, Artificial Sequence
  spacer sequence CTCN PAM
gcucacugcaaccuccgccu

SEQ ID NO: 25589 - RNA, 20 nt, Artificial Sequence
  spacer sequence CTCN PAM
cugcaaccuccgccucccgg

SEQ ID NO: 25590 - RNA, 20 nt, Artificial Sequence
  spacer sequence CTCN PAM
gccucccggauucaagugau

SEQ ID NO: 25591 - RNA, 20 nt, Artificial Sequence
  spacer sequence CTCN PAM
cggauucaagugauucuccu

SEQ ID NO: 25592 - RNA, 20 nt, Artificial Sequence
  spacer sequence CTCN PAM
ugccucagccucccgaguag

SEQ ID NO: 25593 - RNA, 20 nt, Artificial Sequence
  spacer sequence CTCN PAM
gccucccgaguagcugggac

SEQ ID NO: 25594 - RNA, 20 nt, Artificial Sequence
  spacer sequence CTCN PAM
cgaguagcugggacuacagg

SEQ ID NO: 25595 - RNA, 20 nt, Artificial Sequence
  spacer sequence CTCN PAM
ggaggcugaggcaggagaau

SEQ ID NO: 25596 - RNA, 20 nt, Artificial Sequence
  spacer sequence CTCN PAM
acuaaaauacaaaaauuagc

SEQ ID NO: 25597 - RNA, 20 nt, Artificial Sequence
  spacer sequence CTCN PAM
aacuccugaccucaggugau

SEQ ID NO: 25598 - RNA, 20 nt, Artificial Sequence
  spacer sequence CTCN PAM
ugaccucaggugauccgccc

SEQ ID NO: 25599 - RNA, 20 nt, Artificial Sequence
  spacer sequence CTCN PAM
ggugauccgcccgccucggc

SEQ ID NO: 25600 - RNA, 20 nt, Artificial Sequence
  spacer sequence CTCN PAM
gccucccaaaguacugggau

SEQ ID NO: 25601 - RNA, 20 nt, Artificial Sequence
  spacer sequence CTCN PAM
caaaguacugggauuauggg

SEQ ID NO: 25602 - RNA, 20 nt, Artificial Sequence
  spacer sequence CTCN PAM
ugccuguaaucccauaaucc

SEQ ID NO: 25603 - RNA, 20 nt, Artificial Sequence
  spacer sequence CTCN PAM
aggauggccacgcgcggugg

SEQ ID NO: 25604 - RNA, 20 nt, Artificial Sequence
  spacer sequence CTCN PAM
ggccgccuccuucccgccuc

SEQ ID NO: 25605 - RNA, 20 nt, Artificial Sequence
  spacer sequence CTCN PAM
uucccgccucuccggacugu

SEQ ID NO: 25606 - RNA, 20 nt, Artificial Sequence
  spacer sequence CTCN PAM
ccggacuguggacaagugaa

SEQ ID NO: 25607 - RNA, 20 nt, Artificial Sequence
  spacer sequence CTCN PAM
ggacuguggacaagugaagg

SEQ ID NO: 25608 - RNA, 20 nt, Artificial Sequence
  spacer sequence CTCN PAM
gcaaaccugguuaccagaga

SEQ ID NO: 25609 - RNA, 20 nt, Artificial Sequence
  spacer sequence CTCN PAM
gguaaccagguuugcagagu

SEQ ID NO: 25610 - RNA, 20 nt, Artificial Sequence
  spacer sequence CTCN PAM
cugguaaccagguuugcaga

SEQ ID NO: 25611 - RNA, 20 nt, Artificial Sequence
  spacer sequence CTCN PAM
cugccucaguuccccaaaug

SEQ ID NO: 25612 - RNA, 20 nt, Artificial Sequence
  spacer sequence CTCN PAM
guuccccaaaugcagagcag

SEQ ID NO: 25613 - RNA, 20 nt, Artificial Sequence
  spacer sequence CTCN PAM
gcauuuggggaacugaggca

SEQ ID NO: 25614 - RNA, 20 nt, Artificial Sequence
  spacer sequence CTCN PAM
ccacaccccuggggcccugc

SEQ ID NO: 25615 - RNA, 20 nt, Artificial Sequence
  spacer sequence CTCN PAM
cagcggcggcgugggugccu

SEQ ID NO: 25616 - RNA, 20 nt, Artificial Sequence
  spacer sequence CTCN PAM
acacaggcacccacgccgcc

SEQ ID NO: 25617 - RNA, 20 nt, Artificial Sequence
  spacer sequence CTCN PAM
cccuccacacaggcacccac

SEQ ID NO: 25618 - RNA, 20 nt, Artificial Sequence
  spacer sequence CTCN PAM
ccaggugggcagggucccug

SEQ ID NO: 25619 - RNA, 20 nt, Artificial Sequence
  spacer sequence CTCN PAM
gcaccugcggcugcugcucc

SEQ ID NO: 25620 - RNA, 20 nt, Artificial Sequence
  spacer sequence CTCN PAM
gccucugccccgggccuccg

SEQ ID NO: 25621 - RNA, 20 nt, Artificial Sequence
  spacer sequence CTCN PAM
gccccgggccuccgccgugc

SEQ ID NO: 25622 - RNA, 20 nt, Artificial Sequence
  spacer sequence CTCN PAM
gccgugccagauagcaggau

SEQ ID NO: 25623 - RNA, 20 nt, Artificial Sequence
  spacer sequence CTCN PAM
gggaggggguggggggcugg

SEQ ID NO: 25624 - RNA, 20 nt, Artificial Sequence
  spacer sequence CTCN PAM
cggaggccugaugauccugc

SEQ ID NO: 25625 - RNA, 20 nt, Artificial Sequence
  spacer sequence CTCN PAM
cauccacugacagcaccccc

SEQ ID NO: 25626 - RNA, 20 nt, Artificial Sequence
  spacer sequence CTCN PAM
uggcagcucccauccacuga

SEQ ID NO: 25627 - RNA, 20 nt, Artificial Sequence
  spacer sequence CTCN PAM
gaagccccacuccuggcagc

SEQ ID NO: 25628 - RNA, 20 nt, Artificial Sequence
  spacer sequence CTCN PAM
cugaagccccacuccuggca

SEQ ID NO: 25629 - RNA, 20 nt, Artificial Sequence
  spacer sequence CTCN PAM
aaugcugguguccccuuucc

SEQ ID NO: 25630 - RNA, 20 nt, Artificial Sequence
  spacer sequence CTCN PAM
uucuuuuccuucuuccucca

SEQ ID NO: 25631 - RNA, 20 nt, Artificial Sequence
  spacer sequence CTCN PAM
aacuccuggccucaagccau

SEQ ID NO: 25632 - RNA, 20 nt, Artificial Sequence
  spacer sequence CTCN PAM
uggccucaagccauccuccu

SEQ ID NO: 25633 - RNA, 20 nt, Artificial Sequence
  spacer sequence CTCN PAM
agccauccuccugccucggc

SEQ ID NO: 25634 - RNA, 20 nt, Artificial Sequence
  spacer sequence CTCN PAM
ugccucggccucccaaagug

SEQ ID NO: 25635 - RNA, 20 nt, Artificial Sequence
  spacer sequence CTCN PAM
gccucccaaagugcugggau

SEQ ID NO: 25636 - RNA, 20 nt, Artificial Sequence
  spacer sequence CTCN PAM
caaagugcugggauuauagg

SEQ ID NO: 25637 - RNA, 20 nt, Artificial Sequence
  spacer sequence CTCN PAM
ugccuauaaucccagcacuu

SEQ ID NO: 25638 - RNA, 20 nt, Artificial Sequence
  spacer sequence CTCN PAM
cuccaguggaugccugcugg

SEQ ID NO: 25639 - RNA, 20 nt, Artificial Sequence
  spacer sequence CTCN PAM
aguggaugccugcuggauuc

SEQ ID NO: 25640 - RNA, 20 nt, Artificial Sequence
  spacer sequence CTCN PAM
aaaaaaaaaaaaaaaaagac

SEQ ID NO: 25641 - RNA, 20 nt, Artificial Sequence
  spacer sequence CTCN PAM
aucucaaaaaaaaaaaaaaa

SEQ ID NO: 25642 - RNA, 20 nt, Artificial Sequence
  spacer sequence CTCN PAM
cucugucgcccaggcuggag

SEQ ID NO: 25643 - RNA, 20 nt, Artificial Sequence
  spacer sequence CTCN PAM
gucgcccaggcuggagugca

SEQ ID NO: 25644 - RNA, 20 nt, Artificial Sequence
  spacer sequence CTCN PAM
agccugggcgacagagcgag

SEQ ID NO: 25645 - RNA, 20 nt, Artificial Sequence
  spacer sequence CTCN PAM
gaucgcaccacugcacucca

SEQ ID NO: 25646 - RNA, 20 nt, Artificial Sequence
  spacer sequence CTCN PAM
cgcaaucucugccucucagg

SEQ ID NO: 25647 - RNA, 20 nt, Artificial Sequence
  spacer sequence CTCN PAM
gccucucagguucaagugau

SEQ ID NO: 25648 - RNA, 20 nt, Artificial Sequence
  spacer sequence CTCN PAM
cagguucaagugauucuccc

SEQ ID NO: 25649 - RNA, 20 nt, Artificial Sequence
  spacer sequence CTCN PAM
gguucaagugauucucccac

SEQ ID NO: 25650 - RNA, 20 nt, Artificial Sequence
  spacer sequence CTCN PAM
caccucagccuccugaguag

SEQ ID NO: 25651 - RNA, 20 nt, Artificial Sequence
  spacer sequence CTCN PAM
gccuccugaguagcuggaau

SEQ ID NO: 25652 - RNA, 20 nt, Artificial Sequence
  spacer sequence CTCN PAM
ugaguagcuggaauuacagg

SEQ ID NO: 25653 - RNA, 20 nt, Artificial Sequence
  spacer sequence CTCN PAM
ggaggcugaggugggagaau

SEQ ID NO: 25654 - RNA, 20 nt, Artificial Sequence
  spacer sequence CTCN PAM
acuaaaaauacaaaaauuag

SEQ ID NO: 25655 - RNA, 20 nt, Artificial Sequence
  spacer sequence CTCN PAM
auguuggccaggcugggacu

SEQ ID NO: 25656 - RNA, 20 nt, Artificial Sequence
  spacer sequence CTCN PAM
ugaccucaggugaucugccc

SEQ ID NO: 25657 - RNA, 20 nt, Artificial Sequence
  spacer sequence CTCN PAM
ggugaucugcccaccucggc

SEQ ID NO: 25658 - RNA, 20 nt, Artificial Sequence
  spacer sequence CTCN PAM
gccucccaaagugcugggau

SEQ ID NO: 25659 - RNA, 20 nt, Artificial Sequence
  spacer sequence CTCN PAM
caaagugcugggaugacagg

SEQ ID NO: 25660 - RNA, 20 nt, Artificial Sequence
  spacer sequence CTCN PAM
caccugucaucccagcacuu

SEQ ID NO: 25661 - RNA, 20 nt, Artificial Sequence
  spacer sequence CTCN PAM
cacccaucaaggcaaaaucu

SEQ ID NO: 25662 - RNA, 20 nt, Artificial Sequence
  spacer sequence CTCN PAM
uugcaucuuuccugccuacc

SEQ ID NO: 25663 - RNA, 20 nt, Artificial Sequence
  spacer sequence CTCN PAM
ggggacggccucuuugcauc

SEQ ID NO: 25664 - RNA, 20 nt, Artificial Sequence
  spacer sequence CTCN PAM
uccauccguucacucugggg

SEQ ID NO: 25665 - RNA, 20 nt, Artificial Sequence
  spacer sequence CTCN PAM
ggggacggccucauccaucc

SEQ ID NO: 25666 - RNA, 20 nt, Artificial Sequence
  spacer sequence CTCN PAM
uccauccguucacucugggg

SEQ ID NO: 25667 - RNA, 20 nt, Artificial Sequence
  spacer sequence CTCN PAM
ggggacggccucauccaucc

SEQ ID NO: 25668 - RNA, 20 nt, Artificial Sequence
  spacer sequence CTCN PAM
uccauccguucacucugggg

SEQ ID NO: 25669 - RNA, 20 nt, Artificial Sequence
  spacer sequence CTCN PAM
ggggacggccucauccaucc

SEQ ID NO: 25670 - RNA, 20 nt, Artificial Sequence
  spacer sequence CTCN PAM
uccauccguucacucugggg

SEQ ID NO: 25671 - RNA, 20 nt, Artificial Sequence
  spacer sequence CTCN PAM
ggggacggccucauccaucc

SEQ ID NO: 25672 - RNA, 20 nt, Artificial Sequence
  spacer sequence CTCN PAM
uccauccguucacucugggg

SEQ ID NO: 25673 - RNA, 20 nt, Artificial Sequence
  spacer sequence CTCN PAM
ggggacggccucauccaucc

SEQ ID NO: 25674 - RNA, 20 nt, Artificial Sequence
  spacer sequence CTCN PAM
uccauccguucacucugggg

SEQ ID NO: 25675 - RNA, 20 nt, Artificial Sequence
  spacer sequence CTCN PAM
ggggacggccucauccaucc

SEQ ID NO: 25676 - RNA, 20 nt, Artificial Sequence
  spacer sequence CTCN PAM
uccauccguucccucugggg

SEQ ID NO: 25677 - RNA, 20 nt, Artificial Sequence
  spacer sequence CTCN PAM
ggggacggccucauccaucc

SEQ ID NO: 25678 - RNA, 20 nt, Artificial Sequence
  spacer sequence CTCN PAM
uccauccguucccucugggg

SEQ ID NO: 25679 - RNA, 20 nt, Artificial Sequence
  spacer sequence CTCN PAM
ggggacggccucauccaucc

SEQ ID NO: 25680 - RNA, 20 nt, Artificial Sequence
  spacer sequence CTCN PAM
uccauccguucccucugggg

SEQ ID NO: 25681 - RNA, 20 nt, Artificial Sequence
  spacer sequence CTCN PAM
ggggacggccucauccaucc

SEQ ID NO: 25682 - RNA, 20 nt, Artificial Sequence
  spacer sequence CTCN PAM
uccauccguucccucugggg

SEQ ID NO: 25683 - RNA, 20 nt, Artificial Sequence
  spacer sequence CTCN PAM
ggggacggccucauccaucc

SEQ ID NO: 25684 - RNA, 20 nt, Artificial Sequence
  spacer sequence CTCN PAM
uccauccguucccucugggg

SEQ ID NO: 25685 - RNA, 20 nt, Artificial Sequence
  spacer sequence CTCN PAM
ggggacggccucauccaucc

SEQ ID NO: 25686 - RNA, 20 nt, Artificial Sequence
  spacer sequence CTCN PAM
uccauccguucccucugggg

SEQ ID NO: 25687 - RNA, 20 nt, Artificial Sequence
  spacer sequence CTCN PAM
ggggacggccucauccaucc

SEQ ID NO: 25688 - RNA, 20 nt, Artificial Sequence
  spacer sequence CTCN PAM
uccauccauucccucugggg

SEQ ID NO: 25689 - RNA, 20 nt, Artificial Sequence
  spacer sequence CTCN PAM
ggggacggccucauccaucc

SEQ ID NO: 25690 - RNA, 20 nt, Artificial Sequence
  spacer sequence CTCN PAM
uccauucacucuggggacgg

SEQ ID NO: 25691 - RNA, 20 nt, Artificial Sequence
  spacer sequence CTCN PAM
ggcugggugcucauccauuc

SEQ ID NO: 25692 - RNA, 20 nt, Artificial Sequence
  spacer sequence CTCN PAM
gcaccuucccgggcucaggc

SEQ ID NO: 25693 - RNA, 20 nt, Artificial Sequence
  spacer sequence CTCN PAM
ugcagcagcaggcggccugu

SEQ ID NO: 25694 - RNA, 20 nt, Artificial Sequence
  spacer sequence CTCN PAM
cuccugcagcagcaggcggc

SEQ ID NO: 25695 - RNA, 20 nt, Artificial Sequence
  spacer sequence CTCN PAM
cacuccugcagcagcaggcg

SEQ ID NO: 25696 - RNA, 20 nt, Artificial Sequence
  spacer sequence CTCN PAM
gggaaagagggguucagggg

SEQ ID NO: 25697 - RNA, 20 nt, Artificial Sequence
  spacer sequence CTCN PAM
uucccugagugggccccucu

SEQ ID NO: 25698 - RNA, 20 nt, Artificial Sequence
  spacer sequence CTCN PAM
cccugaaccccucuuucccu

SEQ ID NO: 25699 - RNA, 20 nt, Artificial Sequence
  spacer sequence CTCN PAM
acauggcuacagccaucugu

SEQ ID NO: 25700 - RNA, 20 nt, Artificial Sequence
  spacer sequence CTCN PAM
cugccugccugccggucccc

SEQ ID NO: 25701 - RNA, 20 nt, Artificial Sequence
  spacer sequence CTCN PAM
cagaagaaagcccaacuccc

SEQ ID NO: 25702 - RNA, 20 nt, Artificial Sequence
  spacer sequence CTCN PAM
cuacugcucccagaagaaag

SEQ ID NO: 25703 - RNA, 20 nt, Artificial Sequence
  spacer sequence CTCN PAM
acggucaaccguggcucccu

SEQ ID NO: 25704 - RNA, 20 nt, Artificial Sequence
  spacer sequence CTCN PAM
ccugcuccacggucaaccgu

SEQ ID NO: 25705 - RNA, 20 nt, Artificial Sequence
  spacer sequence CTCN PAM
ccccugcuccacggucaacc

SEQ ID NO: 25706 - RNA, 20 nt, Artificial Sequence
  spacer sequence CTCN PAM
gaccuuggaggcugcuggaa

SEQ ID NO: 25707 - RNA, 20 nt, Artificial Sequence
  spacer sequence CTCN PAM
aaggucggagggaccaaggg

SEQ ID NO: 25708 - RNA, 20 nt, Artificial Sequence
  spacer sequence CTCN PAM
uuccagcagccuccaagguc

SEQ ID NO: 25709 - RNA, 20 nt, Artificial Sequence
  spacer sequence CTCN PAM
ccuuccagcagccuccaagg

SEQ ID NO: 25710 - RNA, 20 nt, Artificial Sequence
  spacer sequence CTCN PAM
uuuaccauccuggcugcuuc

SEQ ID NO: 25711 - RNA, 20 nt, Artificial Sequence
  spacer sequence CTCN PAM
caaauccccaugaagcagcc

SEQ ID NO: 25712 - RNA, 20 nt, Artificial Sequence
  spacer sequence CTCN PAM
uucaguuuaacuuugguugu

SEQ ID NO: 25713 - RNA, 20 nt, Artificial Sequence
  spacer sequence CTCN PAM
uacaaccaaaguuaaacuga

SEQ ID NO: 25714 - RNA, 20 nt, Artificial Sequence
  spacer sequence CTCN PAM
aaaaaaaaacaaaauaaaga

SEQ ID NO: 25715 - RNA, 20 nt, Artificial Sequence
  spacer sequence CTCN PAM
accucaaaaaaaaaacaaaa

SEQ ID NO: 25716 - RNA, 20 nt, Artificial Sequence
  spacer sequence CTCN PAM
uguuucccaggcuggagugc

SEQ ID NO: 25717 - RNA, 20 nt, Artificial Sequence
  spacer sequence CTCN PAM
agccugggaaacaagaguga

SEQ ID NO: 25718 - RNA, 20 nt, Artificial Sequence
  spacer sequence CTCN PAM
gcucaccacaaccucugccu

SEQ ID NO: 25719 - RNA, 20 nt, Artificial Sequence
  spacer sequence CTCN PAM
ccacaaccucugccucccgg

SEQ ID NO: 25720 - RNA, 20 nt, Artificial Sequence
  spacer sequence CTCN PAM
gccucccggguucaaacuau

SEQ ID NO: 25721 - RNA, 20 nt, Artificial Sequence
  spacer sequence CTCN PAM
cggguucaaacuauucuccu

SEQ ID NO: 25722 - RNA, 20 nt, Artificial Sequence
  spacer sequence CTCN PAM
ugccucagccucuugaguag

SEQ ID NO: 25723 - RNA, 20 nt, Artificial Sequence
  spacer sequence CTCN PAM
gccucuugaguagcuggggu

SEQ ID NO: 25724 - RNA, 20 nt, Artificial Sequence
  spacer sequence CTCN PAM
ugaguagcugggguuacggg

SEQ ID NO: 25725 - RNA, 20 nt, Artificial Sequence
  spacer sequence CTCN PAM
agaggcugaggcaggagaau

SEQ ID NO: 25726 - RNA, 20 nt, Artificial Sequence
  spacer sequence CTCN PAM
aucaaaaauacaaaauaggc

SEQ ID NO: 25727 - RNA, 20 nt, Artificial Sequence
  spacer sequence CTCN PAM
auguuggucaggcuggucuc

SEQ ID NO: 25728 - RNA, 20 nt, Artificial Sequence
  spacer sequence CTCN PAM
aacuccugaccucaggugau

SEQ ID NO: 25729 - RNA, 20 nt, Artificial Sequence
  spacer sequence CTCN PAM
ugaccucaggugauccgccc

SEQ ID NO: 25730 - RNA, 20 nt, Artificial Sequence
  spacer sequence CTCN PAM
ggugauccgcccgccucagc

SEQ ID NO: 25731 - RNA, 20 nt, Artificial Sequence
  spacer sequence CTCN PAM
gccucccuaagugcugggau

SEQ ID NO: 25732 - RNA, 20 nt, Artificial Sequence
  spacer sequence CTCN PAM
cuaagugcugggauuacagg

SEQ ID NO: 25733 - RNA, 20 nt, Artificial Sequence
  spacer sequence CTCN PAM
cgccuguaaucccagcacuu

SEQ ID NO: 25734 - RNA, 20 nt, Artificial Sequence
  spacer sequence CTCN PAM
ucuuuaagaaagaauccugg

SEQ ID NO: 25735 - RNA, 20 nt, Artificial Sequence
  spacer sequence CTCN PAM
cuguguugcugaggcugauc

SEQ ID NO: 25736 - RNA, 20 nt, Artificial Sequence
  spacer sequence CTCN PAM
gcaacacagcgagaccccgu

SEQ ID NO: 25737 - RNA, 20 nt, Artificial Sequence
  spacer sequence CTCN PAM
aacuccugggcucaagugau

SEQ ID NO: 25738 - RNA, 20 nt, Artificial Sequence
  spacer sequence CTCN PAM
ugggcucaagugauccuucu

SEQ ID NO: 25739 - RNA, 20 nt, Artificial Sequence
  spacer sequence CTCN PAM
agugauccuucugccuuggc

SEQ ID NO: 25740 - RNA, 20 nt, Artificial Sequence
  spacer sequence CTCN PAM
caacgugcugggauuacagg

SEQ ID NO: 25741 - RNA, 20 nt, Artificial Sequence
  spacer sequence CTCN PAM
cgccuguaaucccagcacgu

SEQ ID NO: 25742 - RNA, 20 nt, Artificial Sequence
  spacer sequence CTCN PAM
ugccuguaaucccagcacuu

SEQ ID NO: 25743 - RNA, 20 nt, Artificial Sequence
  spacer sequence CTCN PAM
caaagugcugggauuacagg

SEQ ID NO: 25744 - RNA, 20 nt, Artificial Sequence
  spacer sequence CTCN PAM
gccucccaaagugcugggau

SEQ ID NO: 25745 - RNA, 20 nt, Artificial Sequence
  spacer sequence CTCN PAM
ugaccuugugauccgcccgc

SEQ ID NO: 25746 - RNA, 20 nt, Artificial Sequence
  spacer sequence CTCN PAM
acuaaaaauacaaaaauuag

SEQ ID NO: 25747 - RNA, 20 nt, Artificial Sequence
  spacer sequence CTCN PAM
uggcuaauuuuuguauuuuu

SEQ ID NO: 25748 - RNA, 20 nt, Artificial Sequence
  spacer sequence CTCN PAM
cgauuaggugggaccacagg

SEQ ID NO: 25749 - RNA, 20 nt, Artificial Sequence
  spacer sequence CTCN PAM
gccucccgauuaggugggac

SEQ ID NO: 25750 - RNA, 20 nt, Artificial Sequence
  spacer sequence CTCN PAM
caccucagccucccgauuag

SEQ ID NO: 25751 - RNA, 20 nt, Artificial Sequence
  spacer sequence CTCN PAM
agugauccucccaccucagc

SEQ ID NO: 25752 - RNA, 20 nt, Artificial Sequence
  spacer sequence CTCN PAM
ugggcucaagugauccuccc

SEQ ID NO: 25753 - RNA, 20 nt, Artificial Sequence
  spacer sequence CTCN PAM
cugcagccuccugggcucaa

SEQ ID NO: 25754 - RNA, 20 nt, Artificial Sequence
  spacer sequence CTCN PAM
agccugggcgacagaguaag

SEQ ID NO: 25755 - RNA, 20 nt, Artificial Sequence
  spacer sequence CTCN PAM
gucgcccaggcuggagugca

SEQ ID NO: 25756 - RNA, 20 nt, Artificial Sequence
  spacer sequence CTCN PAM
aaaaaaggaaaaaaaacaac

SEQ ID NO: 25757 - RNA, 20 nt, Artificial Sequence
  spacer sequence CTCN PAM
gaguuccccggcuggucugg

SEQ ID NO: 25758 - RNA, 20 nt, Artificial Sequence
  spacer sequence CTCN PAM
gagguuugguucuuuagucu

SEQ ID NO: 25759 - RNA, 20 nt, Artificial Sequence
  spacer sequence CTCN PAM
uuuucccucugacccuucag

SEQ ID NO: 25760 - RNA, 20 nt, Artificial Sequence
  spacer sequence CTCN PAM
gacccuucagccccgcuggg

SEQ ID NO: 25761 - RNA, 20 nt, Artificial Sequence
  spacer sequence CTCN PAM
caggcgcccacgcacccagc

SEQ ID NO: 25762 - RNA, 20 nt, Artificial Sequence
  spacer sequence CTCN PAM
ggcugcugcccggagggggc

SEQ ID NO: 25763 - RNA, 20 nt, Artificial Sequence
  spacer sequence CTCN PAM
gggcagcagccugagccucc

SEQ ID NO: 25764 - RNA, 20 nt, Artificial Sequence
  spacer sequence CTCN PAM
gaucuauugcugcugcuucu

SEQ ID NO: 25765 - RNA, 20 nt, Artificial Sequence
  spacer sequence CTCN PAM
gaagcagcagcaauagaucu

SEQ ID NO: 25766 - RNA, 20 nt, Artificial Sequence
  spacer sequence CTCN PAM
aaggccagauauaggucugc

SEQ ID NO: 25767 - RNA, 20 nt, Artificial Sequence
  spacer sequence CTCN PAM
ggcugggcacaguggcucau

SEQ ID NO: 25768 - RNA, 20 nt, Artificial Sequence
  spacer sequence CTCN PAM
uacccagaaucccagcacuu

SEQ ID NO: 25769 - RNA, 20 nt, Artificial Sequence
  spacer sequence CTCN PAM
aagugcugggauucugggua

SEQ ID NO: 25770 - RNA, 20 nt, Artificial Sequence
  spacer sequence CTCN PAM
cgaagugcugggauucuggg

SEQ ID NO: 25771 - RNA, 20 nt, Artificial Sequence
  spacer sequence CTCN PAM
gccucucgaagugcugggau

SEQ ID NO: 25772 - RNA, 20 nt, Artificial Sequence
  spacer sequence CTCN PAM
cgccucugccucucgaagug

SEQ ID NO: 25773 - RNA, 20 nt, Artificial Sequence
  spacer sequence CTCN PAM
ggccauccucccgccucugc

SEQ ID NO: 25774 - RNA, 20 nt, Artificial Sequence
  spacer sequence CTCN PAM
ugaccucaggccauccuccc

SEQ ID NO: 25775 - RNA, 20 nt, Artificial Sequence
  spacer sequence CTCN PAM
gcaaaaaauuuaaaaaaaaa

SEQ ID NO: 25776 - RNA, 20 nt, Artificial Sequence
  spacer sequence CTCN PAM
caaguaggugggauuaccgg

SEQ ID NO: 25777 - RNA, 20 nt, Artificial Sequence
  spacer sequence CTCN PAM
ugccccagccucccaaguag

SEQ ID NO: 25778 - RNA, 20 nt, Artificial Sequence
  spacer sequence CTCN PAM
cggguucaaacgauucuccu

SEQ ID NO: 25779 - RNA, 20 nt, Artificial Sequence
  spacer sequence CTCN PAM
gccucccggguucaaacgau

SEQ ID NO: 25780 - RNA, 20 nt, Artificial Sequence
  spacer sequence CTCN PAM
cugcaaccuccgccucccgg

SEQ ID NO: 25781 - RNA, 20 nt, Artificial Sequence
  spacer sequence CTCN PAM
gcucacugcaaccuccgccu

SEQ ID NO: 25782 - RNA, 20 nt, Artificial Sequence
  spacer sequence CTCN PAM
agccugagcgacagagcgag

SEQ ID NO: 25783 - RNA, 20 nt, Artificial Sequence
  spacer sequence CTCN PAM
ggcuggaguacaguggugug

SEQ ID NO: 25784 - RNA, 20 nt, Artificial Sequence
  spacer sequence CTCN PAM
gucgcucaggcuggaguaca

SEQ ID NO: 25785 - RNA, 20 nt, Artificial Sequence
  spacer sequence CTCN PAM
cucugucgcucaggcuggag

SEQ ID NO: 25786 - RNA, 20 nt, Artificial Sequence
  spacer sequence CTCN PAM
gucucaaaacaaaaacaaag

SEQ ID NO: 25787 - RNA, 20 nt, Artificial Sequence
  spacer sequence CTCN PAM
aaacaaaaacaaagugucuc

SEQ ID NO: 25788 - RNA, 20 nt, Artificial Sequence
  spacer sequence CTCN PAM
ggcugggcguggugguucau

SEQ ID NO: 25789 - RNA, 20 nt, Artificial Sequence
  spacer sequence CTCN PAM
gggaggccgaggagggagga

SEQ ID NO: 25790 - RNA, 20 nt, Artificial Sequence
  spacer sequence CTCN PAM
cagagugcugggauucuggg

SEQ ID NO: 25791 - RNA, 20 nt, Artificial Sequence
  spacer sequence CTCN PAM
gccucccagagugcugggau

SEQ ID NO: 25792 - RNA, 20 nt, Artificial Sequence
  spacer sequence CTCN PAM
ucggccucccagagugcugg

SEQ ID NO: 25793 - RNA, 20 nt, Artificial Sequence
  spacer sequence CTCN PAM
cuccucggccucccagagug

SEQ ID NO: 25794 - RNA, 20 nt, Artificial Sequence
  spacer sequence CTCN PAM
agugauccucccuccucggc

SEQ ID NO: 25795 - RNA, 20 nt, Artificial Sequence
  spacer sequence CTCN PAM
ugggcucaagugauccuccc

SEQ ID NO: 25796 - RNA, 20 nt, Artificial Sequence
  spacer sequence CTCN PAM
acaaaaaaaaguuaaaacug

SEQ ID NO: 25797 - RNA, 20 nt, Artificial Sequence
  spacer sequence CTCN PAM
agaggcugaggcaggaggau

SEQ ID NO: 25798 - RNA, 20 nt, Artificial Sequence
  spacer sequence CTCN PAM
ggaguaguugggaccccagg

SEQ ID NO: 25799 - RNA, 20 nt, Artificial Sequence
  spacer sequence CTCN PAM
gccucuggaguaguugggac

SEQ ID NO: 25800 - RNA, 20 nt, Artificial Sequence
  spacer sequence CTCN PAM
ugccucagccucuggaguag

SEQ ID NO: 25801 - RNA, 20 nt, Artificial Sequence
  spacer sequence CTCN PAM
agugauccuccugccucagc

SEQ ID NO: 25802 - RNA, 20 nt, Artificial Sequence
  spacer sequence CTCN PAM
ggcucaagugauccuccugc

SEQ ID NO: 25803 - RNA, 20 nt, Artificial Sequence
  spacer sequence CTCN PAM
caggcucaagugauccuccu

SEQ ID NO: 25804 - RNA, 20 nt, Artificial Sequence
  spacer sequence CTCN PAM
gccucucaggcucaagugau

SEQ ID NO: 25805 - RNA, 20 nt, Artificial Sequence
  spacer sequence CTCN PAM
cugcagccucagccucucag

SEQ ID NO: 25806 - RNA, 20 nt, Artificial Sequence
  spacer sequence CTCN PAM
agccugggccacagagcgag

SEQ ID NO: 25807 - RNA, 20 nt, Artificial Sequence
  spacer sequence CTCN PAM
guggcccaggcuggagugca

SEQ ID NO: 25808 - RNA, 20 nt, Artificial Sequence
  spacer sequence CTCN PAM
cucuguggcccaggcuggag

SEQ ID NO: 25809 - RNA, 20 nt, Artificial Sequence
  spacer sequence CTCN PAM
aaaaaaaaaaaaaaaaaaaa

SEQ ID NO: 25810 - RNA, 20 nt, Artificial Sequence
  spacer sequence CTCN PAM
ucuucugacaucucucugcc

SEQ ID NO: 25811 - RNA, 20 nt, Artificial Sequence
  spacer sequence CTCN PAM
cugccaagucucgggccaac

SEQ ID NO: 25812 - RNA, 20 nt, Artificial Sequence
  spacer sequence CTCN PAM
gccaagucucgggccaaccc

SEQ ID NO: 25813 - RNA, 20 nt, Artificial Sequence
  spacer sequence CTCN PAM
ggccaacccuccuggaggcu

SEQ ID NO: 25814 - RNA, 20 nt, Artificial Sequence
  spacer sequence CTCN PAM
uggaggcucagucaggccaa

SEQ ID NO: 25815 - RNA, 20 nt, Artificial Sequence
  spacer sequence CTCN PAM
aggaggguuggcccgagacu

SEQ ID NO: 25816 - RNA, 20 nt, Artificial Sequence
  spacer sequence CTCN PAM
gucaggccaacccuccugga

SEQ ID NO: 25817 - RNA, 20 nt, Artificial Sequence
  spacer sequence CTCN PAM
uggaggcucagggcucggca

SEQ ID NO: 25818 - RNA, 20 nt, Artificial Sequence
  spacer sequence CTCN PAM
aggaggguuggccugacuga

SEQ ID NO: 25819 - RNA, 20 nt, Artificial Sequence
  spacer sequence CTCN PAM
gggcucggcaguccccaaac

SEQ ID NO: 25820 - RNA, 20 nt, Artificial Sequence
  spacer sequence CTCN PAM
gcaguccccaaacgcuagac

SEQ ID NO: 25821 - RNA, 20 nt, Artificial Sequence
  spacer sequence CTCN PAM
uuggccacagaauucaggga

SEQ ID NO: 25822 - RNA, 20 nt, Artificial Sequence
  spacer sequence CTCN PAM
cuuuggccacagaauucagg

SEQ ID NO: 25823 - RNA, 20 nt, Artificial Sequence
  spacer sequence CTCN PAM
cagcuccugcaccccuccca

SEQ ID NO: 25824 - RNA, 20 nt, Artificial Sequence
  spacer sequence CTCN PAM
ugcaccccucccaccccugc

SEQ ID NO: 25825 - RNA, 20 nt, Artificial Sequence
  spacer sequence CTCN PAM
caccccugccguggccucau

SEQ ID NO: 25826 - RNA, 20 nt, Artificial Sequence
  spacer sequence CTCN PAM
uccccagguggggccucaug

SEQ ID NO: 25827 - RNA, 20 nt, Artificial Sequence
  spacer sequence CTCN PAM
uggacuuuggagccuccugg

SEQ ID NO: 25828 - RNA, 20 nt, Artificial Sequence
  spacer sequence CTCN PAM
aaaguccaugaggccccacc

SEQ ID NO: 25829 - RNA, 20 nt, Artificial Sequence
  spacer sequence CTCN PAM
ugggagacuggagggggccu

SEQ ID NO: 25830 - RNA, 20 nt, Artificial Sequence
  spacer sequence CTCN PAM
caggaggcuccaaaguccau

SEQ ID NO: 25831 - RNA, 20 nt, Artificial Sequence
  spacer sequence CTCN PAM
agucucccaggaggcuccaa

SEQ ID NO: 25832 - RNA, 20 nt, Artificial Sequence
  spacer sequence CTCN PAM
cagggggcccugcagacagg

SEQ ID NO: 25833 - RNA, 20 nt, Artificial Sequence
  spacer sequence CTCN PAM
gggcccaaggacaccgcccu

SEQ ID NO: 25834 - RNA, 20 nt, Artificial Sequence
  spacer sequence CTCN PAM
caccaggucccagcagcugc

SEQ ID NO: 25835 - RNA, 20 nt, Artificial Sequence
  spacer sequence CTCN PAM
guccccaggcaggccccacc

SEQ ID NO: 25836 - RNA, 20 nt, Artificial Sequence
  spacer sequence CTCN PAM
cccagcagugcccaagguca

SEQ ID NO: 25837 - RNA, 20 nt, Artificial Sequence
  spacer sequence CTCN PAM
ucuguccuggccaacccuuu

SEQ ID NO: 25838 - RNA, 20 nt, Artificial Sequence
  spacer sequence CTCN PAM
ggggucuuuuucugaccuuc

SEQ ID NO: 25839 - RNA, 20 nt, Artificial Sequence
  spacer sequence CTCN PAM
caccucccagagccgguggg

SEQ ID NO: 25840 - RNA, 20 nt, Artificial Sequence
  spacer sequence CTCN PAM
cagagccggugggcugggga

SEQ ID NO: 25841 - RNA, 20 nt, Artificial Sequence
  spacer sequence CTCN PAM
gggaggugggaggaagguca

SEQ ID NO: 25842 - RNA, 20 nt, Artificial Sequence
  spacer sequence CTCN PAM
ccagcccaccggcucuggga

SEQ ID NO: 25843 - RNA, 20 nt, Artificial Sequence
  spacer sequence CTCN PAM
ccuccccagcccaccggcuc

SEQ ID NO: 25844 - RNA, 20 nt, Artificial Sequence
  spacer sequence CTCN PAM
ggacuccccuccccagccca

SEQ ID NO: 25845 - RNA, 20 nt, Artificial Sequence
  spacer sequence CTCN PAM
cugguucuaggggugguccg

SEQ ID NO: 25846 - RNA, 20 nt, Artificial Sequence
  spacer sequence CTCN PAM
ccacucccagguggcccugg

SEQ ID NO: 25847 - RNA, 20 nt, Artificial Sequence
  spacer sequence CTCN PAM
cagguggcccugggacuuau

SEQ ID NO: 25848 - RNA, 20 nt, Artificial Sequence
  spacer sequence CTCN PAM
acugacccccucggagcugu

SEQ ID NO: 25849 - RNA, 20 nt, Artificial Sequence
  spacer sequence CTCN PAM
gagcugucguuucucuggga

SEQ ID NO: 25850 - RNA, 20 nt, Artificial Sequence
  spacer sequence CTCN PAM
gagggggucaguggagucug

SEQ ID NO: 25851 - RNA, 20 nt, Artificial Sequence
  spacer sequence CTCN PAM
gggaggugggguggagaaaa

SEQ ID NO: 25852 - RNA, 20 nt, Artificial Sequence
  spacer sequence CTCN PAM
cagagaaacgacagcuccga

SEQ ID NO: 25853 - RNA, 20 nt, Artificial Sequence
  spacer sequence CTCN PAM
accccaccucccagagaaac

SEQ ID NO: 25854 - RNA, 20 nt, Artificial Sequence
  spacer sequence CTCN PAM
cuuuuuccuccccuccccca

SEQ ID NO: 25855 - RNA, 20 nt, Artificial Sequence
  spacer sequence CTCN PAM
ccucccccaccggcgccacc

SEQ ID NO: 25856 - RNA, 20 nt, Artificial Sequence
  spacer sequence CTCN PAM
cccaccggcgccaccacccg

SEQ ID NO: 25857 - RNA, 20 nt, Artificial Sequence
  spacer sequence CTCN PAM
ggugguggcgccgguggggg

SEQ ID NO: 25858 - RNA, 20 nt, Artificial Sequence
  spacer sequence CTCN PAM
cuccucacaggugcccccuc

SEQ ID NO: 25859 - RNA, 20 nt, Artificial Sequence
  spacer sequence CTCN PAM
ccucacaggugcccccucca

SEQ ID NO: 25860 - RNA, 20 nt, Artificial Sequence
  spacer sequence CTCN PAM
ucacaggugcccccuccaga

SEQ ID NO: 25861 - RNA, 20 nt, Artificial Sequence
  spacer sequence CTCN PAM
caggugcccccuccagaggg

SEQ ID NO: 25862 - RNA, 20 nt, Artificial Sequence
  spacer sequence CTCN PAM
agaggggcccgguccucauc

SEQ ID NO: 25863 - RNA, 20 nt, Artificial Sequence
  spacer sequence CTCN PAM
ggagggggcaccugugagga

SEQ ID NO: 25864 - RNA, 20 nt, Artificial Sequence
  spacer sequence CTCN PAM
ucaggugggggcggcaccuc

SEQ ID NO: 25865 - RNA, 20 nt, Artificial Sequence
  spacer sequence CTCN PAM
cacccccccaggccucccac

SEQ ID NO: 25866 - RNA, 20 nt, Artificial Sequence
  spacer sequence CTCN PAM
cacacccccccccgugcaga

SEQ ID NO: 25867 - RNA, 20 nt, Artificial Sequence
  spacer sequence CTCN PAM
gcacggggggggguguggga

SEQ ID NO: 25868 - RNA, 20 nt, Artificial Sequence
  spacer sequence CTCN PAM
cccggcucugcacggggggg

SEQ ID NO: 25869 - RNA, 20 nt, Artificial Sequence
  spacer sequence CTCN PAM
auccccagagccacggagug

SEQ ID NO: 25870 - RNA, 20 nt, Artificial Sequence
  spacer sequence CTCN PAM
ggggauggagggaagacgcu

SEQ ID NO: 25871 - RNA, 20 nt, Artificial Sequence
  spacer sequence CTCN PAM
guggcucuggggauggaggg

SEQ ID NO: 25872 - RNA, 20 nt, Artificial Sequence
  spacer sequence CTCN PAM
ggcgugcaaccuucugggaa

SEQ ID NO: 25873 - RNA, 20 nt, Artificial Sequence
  spacer sequence CTCN PAM
uugguuuucuucccagaagg

SEQ ID NO: 25874 - RNA, 20 nt, Artificial Sequence
  spacer sequence CTCN PAM
gaccccuucauuccucuuug

SEQ ID NO: 25875 - RNA, 20 nt, Artificial Sequence
  spacer sequence CTCN PAM
gccucugaccccuucauucc

SEQ ID NO: 25876 - RNA, 20 nt, Artificial Sequence
  spacer sequence CTCN PAM
acagccccccucagccucug

SEQ ID NO: 25877 - RNA, 20 nt, Artificial Sequence
  spacer sequence CTCN PAM
gucagaaggcgacguuuggg

SEQ ID NO: 25878 - RNA, 20 nt, Artificial Sequence
  spacer sequence CTCN PAM
ugccuucccgcccaaacguc

SEQ ID NO: 25879 - RNA, 20 nt, Artificial Sequence
  spacer sequence CTCN PAM
gcuccugccuucccgcccaa

SEQ ID NO: 25880 - RNA, 20 nt, Artificial Sequence
  spacer sequence CTCN PAM
cggguccccgcucggcuccu

SEQ ID NO: 25881 - RNA, 20 nt, Artificial Sequence
  spacer sequence CTCN PAM
gcggcgcuguuccuucugcc

SEQ ID NO: 25882 - RNA, 20 nt, Artificial Sequence
  spacer sequence CTCN PAM
ugccuguaaucccagcgcug

SEQ ID NO: 25883 - RNA, 20 nt, Artificial Sequence
  spacer sequence CTCN PAM
cacagcgcugggauuacagg

SEQ ID NO: 25884 - RNA, 20 nt, Artificial Sequence
  spacer sequence CTCN PAM
gccucccacagcgcugggau

SEQ ID NO: 25885 - RNA, 20 nt, Artificial Sequence
  spacer sequence CTCN PAM
ugccucagccucccacagcg

SEQ ID NO: 25886 - RNA, 20 nt, Artificial Sequence
  spacer sequence CTCN PAM
uggccuuaagugauccuccu

SEQ ID NO: 25887 - RNA, 20 nt, Artificial Sequence
  spacer sequence CTCN PAM
aacuccuggccuuaagugau

SEQ ID NO: 25888 - RNA, 20 nt, Artificial Sequence
  spacer sequence CTCN PAM
ggcuggucucaaacuccugg

SEQ ID NO: 25889 - RNA, 20 nt, Artificial Sequence
  spacer sequence CTCN PAM
auagaaauacaaaaauuagc

SEQ ID NO: 25890 - RNA, 20 nt, Artificial Sequence
  spacer sequence CTCN PAM
gcuaauuuuuguauuucuau

SEQ ID NO: 25891 - RNA, 20 nt, Artificial Sequence
  spacer sequence CTCN PAM
uuggcucaggagaccgaggu

SEQ ID NO: 25892 - RNA, 20 nt, Artificial Sequence
  spacer sequence CTCN PAM
ggagaccgaggugggaggug

SEQ ID NO: 25893 - RNA, 20 nt, Artificial Sequence
  spacer sequence CTCN PAM
ugagccaaugagaccacagg

SEQ ID NO: 25894 - RNA, 20 nt, Artificial Sequence
  spacer sequence CTCN PAM
gucuccugagccaaugagac

SEQ ID NO: 25895 - RNA, 20 nt, Artificial Sequence
  spacer sequence CTCN PAM
caccucggucuccugagcca

SEQ ID NO: 25896 - RNA, 20 nt, Artificial Sequence
  spacer sequence CTCN PAM
accucccaccucggucuccu

SEQ ID NO: 25897 - RNA, 20 nt, Artificial Sequence
  spacer sequence CTCN PAM
cugcagccuccaccucccac

SEQ ID NO: 25898 - RNA, 20 nt, Artificial Sequence
  spacer sequence CTCN PAM
ccacugcacuccagccugag

SEQ ID NO: 25899 - RNA, 20 nt, Artificial Sequence
  spacer sequence CTCN PAM
agccugagugacagagcgag

SEQ ID NO: 25900 - RNA, 20 nt, Artificial Sequence
  spacer sequence CTCN PAM
ggcuggagugcaguggugag

SEQ ID NO: 25901 - RNA, 20 nt, Artificial Sequence
  spacer sequence CTCN PAM
gucacucaggcuggagugca

SEQ ID NO: 25902 - RNA, 20 nt, Artificial Sequence
  spacer sequence CTCN PAM
cucugucacucaggcuggag

SEQ ID NO: 25903 - RNA, 20 nt, Artificial Sequence
  spacer sequence CTCN PAM
aggccggggcggagggagca

SEQ ID NO: 25904 - RNA, 20 nt, Artificial Sequence
  spacer sequence CTCN PAM
gccccggccuugagcugccc

SEQ ID NO: 25905 - RNA, 20 nt, Artificial Sequence
  spacer sequence CTCN PAM
cuccgccccggccuugagcu

SEQ ID NO: 25906 - RNA, 20 nt, Artificial Sequence
  spacer sequence CTCN PAM
ugcucccuccgccccggccu

SEQ ID NO: 25907 - RNA, 20 nt, Artificial Sequence
  spacer sequence CTCN PAM
ccugcucccuccgccccggc

SEQ ID NO: 25908 - RNA, 20 nt, Artificial Sequence
  spacer sequence CTCN PAM
cugcccucuccugcucccuc

SEQ ID NO: 25909 - RNA, 20 nt, Artificial Sequence
  spacer sequence CTCN PAM
uggccccucccugcccucuc

SEQ ID NO: 25910 - RNA, 20 nt, Artificial Sequence
  spacer sequence CTCN PAM
cagggccccccagcacccuc

SEQ ID NO: 25911 - RNA, 20 nt, Artificial Sequence
  spacer sequence CTCN PAM
gccacagccucccagggccc

SEQ ID NO: 25912 - RNA, 20 nt, Artificial Sequence
  spacer sequence CTCN PAM
cucggccacagccucccagg

SEQ ID NO: 25913 - RNA, 20 nt, Artificial Sequence
  spacer sequence CTCN PAM
gaugucugugaaaaaccccc

SEQ ID NO: 25914 - RNA, 20 nt, Artificial Sequence
  spacer sequence CTCN PAM
gcaguugggugggguggggg

SEQ ID NO: 25915 - RNA, 20 nt, Artificial Sequence
  spacer sequence CTCN PAM
ugccagacccuuccccacuc

SEQ ID NO: 25916 - RNA, 20 nt, Artificial Sequence
  spacer sequence CTCN PAM
aggucccccggccgccccuc

SEQ ID NO: 25917 - RNA, 20 nt, Artificial Sequence
  spacer sequence CTCN PAM
acgcgcucugugccucgguu

SEQ ID NO: 25918 - RNA, 20 nt, Artificial Sequence
  spacer sequence CTCN PAM
gugccucgguuuccccuucu

SEQ ID NO: 25919 - RNA, 20 nt, Artificial Sequence
  spacer sequence CTCN PAM
guuuccccuucuccgaagca

SEQ ID NO: 25920 - RNA, 20 nt, Artificial Sequence
  spacer sequence CTCN PAM
gaagcagguggugcugggaa

SEQ ID NO: 25921 - RNA, 20 nt, Artificial Sequence
  spacer sequence CTCN PAM
ccuucccagcaccaccugcu

SEQ ID NO: 25922 - RNA, 20 nt, Artificial Sequence
  spacer sequence CTCN PAM
guccacuuccugcugugggg

SEQ ID NO: 25923 - RNA, 20 nt, Artificial Sequence
  spacer sequence CTCN PAM
ccucuguccacuuccugcug

SEQ ID NO: 25924 - RNA, 20 nt, Artificial Sequence
  spacer sequence CTCN PAM
gggaaagacccccaggccug

SEQ ID NO: 25925 - RNA, 20 nt, Artificial Sequence
  spacer sequence CTCN PAM
gugcgaugccaagaaaaugc

SEQ ID NO: 25926 - RNA, 20 nt, Artificial Sequence
  spacer sequence CTCN PAM
ucugucugcccuggaacaug

SEQ ID NO: 25927 - RNA, 20 nt, Artificial Sequence
  spacer sequence CTCN PAM
cgucugucugcccuggaaca

SEQ ID NO: 25928 - RNA, 20 nt, Artificial Sequence
  spacer sequence CTCN PAM
cauggccccagcugugugga

SEQ ID NO: 25929 - RNA, 20 nt, Artificial Sequence
  spacer sequence CTCN PAM
cggccccccuuggaccccca

SEQ ID NO: 25930 - RNA, 20 nt, Artificial Sequence
  spacer sequence CTCN PAM
cgggguuucuggcucacggc

SEQ ID NO: 25931 - RNA, 20 nt, Artificial Sequence
  spacer sequence CTCN PAM
cacccaccuuuaccgaccac

SEQ ID NO: 25932 - RNA, 20 nt, Artificial Sequence
  spacer sequence CTCN PAM
gcucccacccaccuuuaccg

SEQ ID NO: 25933 - RNA, 20 nt, Artificial Sequence
  spacer sequence CTCN PAM
gcagaugcucugcucccacc

SEQ ID NO: 25934 - RNA, 20 nt, Artificial Sequence
  spacer sequence CTCN PAM
caggaccgauaucaccuccg

SEQ ID NO: 25935 - RNA, 20 nt, Artificial Sequence
  spacer sequence CTCN PAM
ccuccagggagggaaugacc

SEQ ID NO: 25936 - RNA, 20 nt, Artificial Sequence
  spacer sequence CTCN PAM
agggagggaaugaccacagg

SEQ ID NO: 25937 - RNA, 20 nt, Artificial Sequence
  spacer sequence CTCN PAM
cuggaggggagccccccguc

SEQ ID NO: 25938 - RNA, 20 nt, Artificial Sequence
  spacer sequence CTCN PAM
gccccuucccuucgucuggg

SEQ ID NO: 25939 - RNA, 20 nt, Artificial Sequence
  spacer sequence CTCN PAM
cagacgggaggaacagccgg

SEQ ID NO: 25940 - RNA, 20 nt, Artificial Sequence
  spacer sequence CTCN PAM
cgucugcgaggccuucucag

SEQ ID NO: 25941 - RNA, 20 nt, Artificial Sequence
  spacer sequence CTCN PAM
gggcugauggggggcggugg

SEQ ID NO: 25942 - RNA, 20 nt, Artificial Sequence
  spacer sequence CTCN PAM
gcggaggggcaccuucagaa

SEQ ID NO: 25943 - RNA, 20 nt, Artificial Sequence
  spacer sequence CTCN PAM
gcugagacccccaccgcccc

SEQ ID NO: 25944 - RNA, 20 nt, Artificial Sequence
  spacer sequence CTCN PAM
cgugaucagagcaggcccca

SEQ ID NO: 25945 - RNA, 20 nt, Artificial Sequence
  spacer sequence CTCN PAM
gaucacgggaggggucgggu

SEQ ID NO: 25946 - RNA, 20 nt, Artificial Sequence
  spacer sequence CTCN PAM
cuggggccugcucugaucac

SEQ ID NO: 25947 - RNA, 20 nt, Artificial Sequence
  spacer sequence CTCN PAM
acgccgccugaccucccugg

SEQ ID NO: 25948 - RNA, 20 nt, Artificial Sequence
  spacer sequence CTCN PAM
ccuccacgccgccugaccuc

SEQ ID NO: 25949 - RNA, 20 nt, Artificial Sequence
  spacer sequence CTCN PAM
gcccucagccccuggggagg

SEQ ID NO: 25950 - RNA, 20 nt, Artificial Sequence
  spacer sequence CTCN PAM
gccccuggggagggaguuuc

SEQ ID NO: 25951 - RNA, 20 nt, Artificial Sequence
  spacer sequence CTCN PAM
ccaggggcugagggccgaga

SEQ ID NO: 25952 - RNA, 20 nt, Artificial Sequence
  spacer sequence CTCN PAM
cuccccaggggcugagggcc

SEQ ID NO: 25953 - RNA, 20 nt, Artificial Sequence
  spacer sequence CTCN PAM
ggaaacucccuccccagggg

SEQ ID NO: 25954 - RNA, 20 nt, Artificial Sequence
  spacer sequence CTCN PAM
agccuggguuuagggcuccu

SEQ ID NO: 25955 - RNA, 20 nt, Artificial Sequence
  spacer sequence CTCN PAM
uguggguguguggugggcgg

SEQ ID NO: 25956 - RNA, 20 nt, Artificial Sequence
  spacer sequence CTCN PAM
gaaaucagccgcccaccaca

SEQ ID NO: 25957 - RNA, 20 nt, Artificial Sequence
  spacer sequence CTCN PAM
gaaacgucaaccagaaagcu

SEQ ID NO: 25958 - RNA, 20 nt, Artificial Sequence
  spacer sequence CTCN PAM
ccuggguucuguggccgaaa

SEQ ID NO: 25959 - RNA, 20 nt, Artificial Sequence
  spacer sequence CTCN PAM
gccagcuggccagggcgggg

SEQ ID NO: 25960 - RNA, 20 nt, Artificial Sequence
  spacer sequence CTCN PAM
ccuguggggggcgccccgcc

SEQ ID NO: 25961 - RNA, 20 nt, Artificial Sequence
  spacer sequence CTCN PAM
ggcccccgguuccgcucccc

SEQ ID NO: 25962 - RNA, 20 nt, Artificial Sequence
  spacer sequence CTCN PAM
aauggccguugcugugggca

SEQ ID NO: 25963 - RNA, 20 nt, Artificial Sequence
  spacer sequence CTCN PAM
cccgccagcagcuggggccc

SEQ ID NO: 25964 - RNA, 20 nt, Artificial Sequence
  spacer sequence CTCN PAM
cuuuacugccacgcaucagu

SEQ ID NO: 25965 - RNA, 20 nt, Artificial Sequence
  spacer sequence CTCN PAM
ccaccggcccaguucgccca

SEQ ID NO: 25966 - RNA, 20 nt, Artificial Sequence
  spacer sequence CTCN PAM
caggccaaauggugggcgaa

SEQ ID NO: 25967 - RNA, 20 nt, Artificial Sequence
  spacer sequence CTCN PAM
ccucuccaaccccaaccuug

SEQ ID NO: 25968 - RNA, 20 nt, Artificial Sequence
  spacer sequence CTCN PAM
ccaaccccaaccuuggcugg

SEQ ID NO: 25969 - RNA, 20 nt, Artificial Sequence
  spacer sequence CTCN PAM
aaccccaaccuuggcuggcu

SEQ ID NO: 25970 - RNA, 20 nt, Artificial Sequence
  spacer sequence CTCN PAM
guuuccccauccgggaugug

SEQ ID NO: 25971 - RNA, 20 nt, Artificial Sequence
  spacer sequence CTCN PAM
caucccggauggggaaaccg

SEQ ID NO: 25972 - RNA, 20 nt, Artificial Sequence
  spacer sequence CTCN PAM
cacacucuauuugagagaug

SEQ ID NO: 25973 - RNA, 20 nt, Artificial Sequence
  spacer sequence CTCN PAM
auuugagagauggggaaacu

SEQ ID NO: 25974 - RNA, 20 nt, Artificial Sequence
  spacer sequence CTCN PAM
aauagagugugugagaaaac

SEQ ID NO: 25975 - RNA, 20 nt, Artificial Sequence
  spacer sequence CTCN PAM
caaauagagugugugagaaa

SEQ ID NO: 25976 - RNA, 20 nt, Artificial Sequence
  spacer sequence CTCN PAM
guuuccccaucucucaaaua

SEQ ID NO: 25977 - RNA, 20 nt, Artificial Sequence
  spacer sequence CTCN PAM
ugccucaguuuccccaucuc

SEQ ID NO: 25978 - RNA, 20 nt, Artificial Sequence
  spacer sequence CTCN PAM
ccgcaccuccugccucaguu

SEQ ID NO: 25979 - RNA, 20 nt, Artificial Sequence
  spacer sequence CTCN PAM
gaggagaggaccuuccgcuc

SEQ ID NO: 25980 - RNA, 20 nt, Artificial Sequence
  spacer sequence CTCN PAM
gagauucugacccgguauua

SEQ ID NO: 25981 - RNA, 20 nt, Artificial Sequence
  spacer sequence CTCN PAM
ucugagauucugacccggua

SEQ ID NO: 25982 - RNA, 20 nt, Artificial Sequence
  spacer sequence CTCN PAM
ccucugagauucugacccgg

SEQ ID NO: 25983 - RNA, 20 nt, Artificial Sequence
  spacer sequence CTCN PAM
cccuggaagggcccaaggug

SEQ ID NO: 25984 - RNA, 20 nt, Artificial Sequence
  spacer sequence CTCN PAM
acgugcgguucuuagccggg

SEQ ID NO: 25985 - RNA, 20 nt, Artificial Sequence
  spacer sequence CTCN PAM
aaccgcgggcguaaaacaaa

SEQ ID NO: 25986 - RNA, 20 nt, Artificial Sequence
  spacer sequence CTCN PAM
cuccguccuggagcccagag

SEQ ID NO: 25987 - RNA, 20 nt, Artificial Sequence
  spacer sequence CTCN PAM
guccuggagcccagagucca

SEQ ID NO: 25988 - RNA, 20 nt, Artificial Sequence
  spacer sequence CTCN PAM
aggacggagggagaacaggu

SEQ ID NO: 25989 - RNA, 20 nt, Artificial Sequence
  spacer sequence CTCN PAM
gggcuccaggacggagggag

SEQ ID NO: 25990 - RNA, 20 nt, Artificial Sequence
  spacer sequence CTCN PAM
auuuuggacucugggcucca

SEQ ID NO: 25991 - RNA, 20 nt, Artificial Sequence
  spacer sequence CTCN PAM
cuccaggggcugcaggagga

SEQ ID NO: 25992 - RNA, 20 nt, Artificial Sequence
  spacer sequence CTCN PAM
aggggcugcaggaggagccu

SEQ ID NO: 25993 - RNA, 20 nt, Artificial Sequence
  spacer sequence CTCN PAM
ugcagccccuggagggagcg

SEQ ID NO: 25994 - RNA, 20 nt, Artificial Sequence
  spacer sequence CTCN PAM
uccugcagccccuggaggga

SEQ ID NO: 25995 - RNA, 20 nt, Artificial Sequence
  spacer sequence CTCN PAM
cccagcuccugggggcucca

SEQ ID NO: 25996 - RNA, 20 nt, Artificial Sequence
  spacer sequence CTCN PAM
cagcuccugggggcuccagg

SEQ ID NO: 25997 - RNA, 20 nt, Artificial Sequence
  spacer sequence CTCN PAM
ugggggcuccaggagucccu

SEQ ID NO: 25998 - RNA, 20 nt, Artificial Sequence
  spacer sequence CTCN PAM
aggagucccuugacaugugg

SEQ ID NO: 25999 - RNA, 20 nt, Artificial Sequence
  spacer sequence CTCN PAM
uggagcccccaggagcuggg

SEQ ID NO: 26000 - RNA, 20 nt, Artificial Sequence
  spacer sequence CTCN PAM
gucucugugcgaccgucucc

SEQ ID NO: 26001 - RNA, 20 nt, Artificial Sequence
  spacer sequence CTCN PAM
gugcgaccgucuccagugcc

SEQ ID NO: 26002 - RNA, 20 nt, Artificial Sequence
  spacer sequence CTCN PAM
agugcccaccggccuucacu

SEQ ID NO: 26003 - RNA, 20 nt, Artificial Sequence
  spacer sequence CTCN PAM
auuugaucacgucugcaaag

SEQ ID NO: 26004 - RNA, 20 nt, Artificial Sequence
  spacer sequence CTCN PAM
uucugagguucugggccgau

SEQ ID NO: 26005 - RNA, 20 nt, Artificial Sequence
  spacer sequence CTCN PAM
gaacgagacguuauuuggaa

SEQ ID NO: 26006 - RNA, 20 nt, Artificial Sequence
  spacer sequence CTCN PAM
ccauuccaguaccugcugcc

SEQ ID NO: 26007 - RNA, 20 nt, Artificial Sequence
  spacer sequence CTCN PAM
ggcguuucccuggcaagcuc

SEQ ID NO: 26008 - RNA, 20 nt, Artificial Sequence
  spacer sequence CTCN PAM
uccugucccccucuccgccc

SEQ ID NO: 26009 - RNA, 20 nt, Artificial Sequence
  spacer sequence CTCN PAM
ccgcccugucccccucuccg

SEQ ID NO: 26010 - RNA, 20 nt, Artificial Sequence
  spacer sequence CTCN PAM
gcccugucccccucuccgcc

SEQ ID NO: 26011 - RNA, 20 nt, Artificial Sequence
  spacer sequence CTCN PAM
ccgcccugcccggcucacuu

SEQ ID NO: 26012 - RNA, 20 nt, Artificial Sequence
  spacer sequence CTCN PAM
gcccugcccggcucacuuuu

SEQ ID NO: 26013 - RNA, 20 nt, Artificial Sequence
  spacer sequence CTCN PAM
cuuuugcagcugagaaaauc

SEQ ID NO: 26014 - RNA, 20 nt, Artificial Sequence
  spacer sequence CTCN PAM
gcugcaaaagugagccgggc

SEQ ID NO: 26015 - RNA, 20 nt, Artificial Sequence
  spacer sequence CTCN PAM
uuacuugaaccuugauuuuc

SEQ ID NO: 26016 - RNA, 20 nt, Artificial Sequence
  spacer sequence CTCN PAM
gcugauuccagacucuggga

SEQ ID NO: 26017 - RNA, 20 nt, Artificial Sequence
  spacer sequence CTCN PAM
gggaacaaaacagacuaaac

SEQ ID NO: 26018 - RNA, 20 nt, Artificial Sequence
  spacer sequence CTCN PAM
uagauccgugacucggugau

SEQ ID NO: 26019 - RNA, 20 nt, Artificial Sequence
  spacer sequence CTCN PAM
gugauggacggggucucgga

SEQ ID NO: 26020 - RNA, 20 nt, Artificial Sequence
  spacer sequence CTCN PAM
gaggaagaacguggagggga

SEQ ID NO: 26021 - RNA, 20 nt, Artificial Sequence
  spacer sequence CTCN PAM
gagaccccguccaucaccga

SEQ ID NO: 26022 - RNA, 20 nt, Artificial Sequence
  spacer sequence CTCN PAM
acguucuuccuccgagaccc

SEQ ID NO: 26023 - RNA, 20 nt, Artificial Sequence
  spacer sequence CTCN PAM
ccuccacguucuuccuccga

SEQ ID NO: 26024 - RNA, 20 nt, Artificial Sequence
  spacer sequence CTCN PAM
gaccccggcccggcugccgc

SEQ ID NO: 26025 - RNA, 20 nt, Artificial Sequence
  spacer sequence CTCN PAM
uccucugaccccggcccggc

SEQ ID NO: 26026 - RNA, 20 nt, Artificial Sequence
  spacer sequence CTCN PAM
ugggacccaccggcccggcc

SEQ ID NO: 26027 - RNA, 20 nt, Artificial Sequence
  spacer sequence CTCN PAM
gguagacccggcuggccggg

SEQ ID NO: 26028 - RNA, 20 nt, Artificial Sequence
  spacer sequence CTCN PAM
ggcagcugaaggggaaaggg

SEQ ID NO: 26029 - RNA, 20 nt, Artificial Sequence
  spacer sequence CTCN PAM
ccggccaccauaaaucagcg

SEQ ID NO: 26030 - RNA, 20 nt, Artificial Sequence
  spacer sequence CTCN PAM
gccccaacccggccagcgcc

SEQ ID NO: 26031 - RNA, 20 nt, Artificial Sequence
  spacer sequence CTCN PAM
ggcagccucgaccacccagg

SEQ ID NO: 26032 - RNA, 20 nt, Artificial Sequence
  spacer sequence CTCN PAM
accacccagggcagagguca

SEQ ID NO: 26033 - RNA, 20 nt, Artificial Sequence
  spacer sequence CTCN PAM
gcccuggguggucgaggcug

SEQ ID NO: 26034 - RNA, 20 nt, Artificial Sequence
  spacer sequence CTCN PAM
uggcugcccccccagccccu

SEQ ID NO: 26035 - RNA, 20 nt, Artificial Sequence
  spacer sequence CTCN PAM
cugggccuccaauacacaga

SEQ ID NO: 26036 - RNA, 20 nt, Artificial Sequence
  spacer sequence CTCN PAM
aauacacagacggggaaacu

SEQ ID NO: 26037 - RNA, 20 nt, Artificial Sequence
  spacer sequence CTCN PAM
guuuccccgucuguguauug

SEQ ID NO: 26038 - RNA, 20 nt, Artificial Sequence
  spacer sequence CTCN PAM
gggccucaguuuccccgucu

SEQ ID NO: 26039 - RNA, 20 nt, Artificial Sequence
  spacer sequence CTCN PAM
cugggccucaguuuccccgu

SEQ ID NO: 26040 - RNA, 20 nt, Artificial Sequence
  spacer sequence CTCN PAM
ccagcaccugggaugucccc

SEQ ID NO: 26041 - RNA, 20 nt, Artificial Sequence
  spacer sequence CTCN PAM
uucugggcccuaaugaccga

SEQ ID NO: 26042 - RNA, 20 nt, Artificial Sequence
  spacer sequence CTCN PAM
gcugggaugaucggucauua

SEQ ID NO: 26043 - RNA, 20 nt, Artificial Sequence
  spacer sequence CTCN PAM
ccacugcccagccagccaca

SEQ ID NO: 26044 - RNA, 20 nt, Artificial Sequence
  spacer sequence CTCN PAM
ggggaauguggcuggcuggg

SEQ ID NO: 26045 - RNA, 20 nt, Artificial Sequence
  spacer sequence CTCN PAM
uccucggcaaauuggccccc

SEQ ID NO: 26046 - RNA, 20 nt, Artificial Sequence
  spacer sequence CTCN PAM
ucggcaaauuggcccccgcc

SEQ ID NO: 26047 - RNA, 20 nt, Artificial Sequence
  spacer sequence CTCN PAM
gcaaauuggcccccgccuga

SEQ ID NO: 26048 - RNA, 20 nt, Artificial Sequence
  spacer sequence CTCN PAM
gcuuucuaauuaucccugcc

SEQ ID NO: 26049 - RNA, 20 nt, Artificial Sequence
  spacer sequence CTCN PAM
uggcuccuuguaccccagac

SEQ ID NO: 26050 - RNA, 20 nt, Artificial Sequence
  spacer sequence CTCN PAM
uuguaccccagacggagccu

SEQ ID NO: 26051 - RNA, 20 nt, Artificial Sequence
  spacer sequence CTCN PAM
gucugggguacaaggagcca

SEQ ID NO: 26052 - RNA, 20 nt, Artificial Sequence
  spacer sequence CTCN PAM
uuccccucuggaagacguuc

SEQ ID NO: 26053 - RNA, 20 nt, Artificial Sequence
  spacer sequence CTCN PAM
ggaagacguuccggggccug

SEQ ID NO: 26054 - RNA, 20 nt, Artificial Sequence
  spacer sequence CTCN PAM
ccagccaccacccuggcagg

SEQ ID NO: 26055 - RNA, 20 nt, Artificial Sequence
  spacer sequence CTCN PAM
gccugccagggugguggcug

SEQ ID NO: 26056 - RNA, 20 nt, Artificial Sequence
  spacer sequence CTCN PAM
uuucauagcuggaggcugag

SEQ ID NO: 26057 - RNA, 20 nt, Artificial Sequence
  spacer sequence CTCN PAM
agcuaugaaaugagccaccg

SEQ ID NO: 26058 - RNA, 20 nt, Artificial Sequence
  spacer sequence CTCN PAM
gccuccagcuaugaaaugag

SEQ ID NO: 26059 - RNA, 20 nt, Artificial Sequence
  spacer sequence CTCN PAM
aggcuccaggugcggggaag

SEQ ID NO: 26060 - RNA, 20 nt, Artificial Sequence
  spacer sequence CTCN PAM
aggugcggggaagccagcag

SEQ ID NO: 26061 - RNA, 20 nt, Artificial Sequence
  spacer sequence CTCN PAM
ugcuggcuuccccgcaccug

SEQ ID NO: 26062 - RNA, 20 nt, Artificial Sequence
  spacer sequence CTCN PAM
ugucuccugcuggcuucccc

SEQ ID NO: 26063 - RNA, 20 nt, Artificial Sequence
  spacer sequence CTCN PAM
gggccaaguccccagcagcc

SEQ ID NO: 26064 - RNA, 20 nt, Artificial Sequence
  spacer sequence CTCN PAM
ggucccgcacucgccgcugu

SEQ ID NO: 26065 - RNA, 20 nt, Artificial Sequence
  spacer sequence CTCN PAM
ccgcugugucucaguuuccu

SEQ ID NO: 26066 - RNA, 20 nt, Artificial Sequence
  spacer sequence CTCN PAM
guuuccucaccugcaaagca

SEQ ID NO: 26067 - RNA, 20 nt, Artificial Sequence
  spacer sequence CTCN PAM
ccugcaaagcagagccaguu

SEQ ID NO: 26068 - RNA, 20 nt, Artificial Sequence
  spacer sequence CTCN PAM
gcuuugcaggugaggaaacu

SEQ ID NO: 26069 - RNA, 20 nt, Artificial Sequence
  spacer sequence CTCN PAM
gaacaaaugcgcucccgucc

SEQ ID NO: 26070 - RNA, 20 nt, Artificial Sequence
  spacer sequence CTCN PAM
cguccgacccucaggacagc

SEQ ID NO: 26071 - RNA, 20 nt, Artificial Sequence
  spacer sequence CTCN PAM
ggacagccccgggaggcaug

SEQ ID NO: 26072 - RNA, 20 nt, Artificial Sequence
  spacer sequence CTCN PAM
cggggcuguccugagggucg

SEQ ID NO: 26073 - RNA, 20 nt, Artificial Sequence
  spacer sequence CTCN PAM
ggcaggcacuguccuagggu

SEQ ID NO: 26074 - RNA, 20 nt, Artificial Sequence
  spacer sequence CTCN PAM
accuuuucuuugggggacac

SEQ ID NO: 26075 - RNA, 20 nt, Artificial Sequence
  spacer sequence CTCN PAM
cgccugugaccccagcacuu

SEQ ID NO: 26076 - RNA, 20 nt, Artificial Sequence
  spacer sequence CTCN PAM
aagugcuggggucacaggcg

SEQ ID NO: 26077 - RNA, 20 nt, Artificial Sequence
  spacer sequence CTCN PAM
cguguugccuucucaaagug

SEQ ID NO: 26078 - RNA, 20 nt, Artificial Sequence
  spacer sequence CTCN PAM
auccucacguguugccuucu

SEQ ID NO: 26079 - RNA, 20 nt, Artificial Sequence
  spacer sequence CTCN PAM
cucgauccucacguguugcc

SEQ ID NO: 26080 - RNA, 20 nt, Artificial Sequence
  spacer sequence CTCN PAM
ugggcucccucgauccucac

SEQ ID NO: 26081 - RNA, 20 nt, Artificial Sequence
  spacer sequence CTCN PAM
accuccugggcucccucgau

SEQ ID NO: 26082 - RNA, 20 nt, Artificial Sequence
  spacer sequence CTCN PAM
acaaaagaaaauguaaaaac

SEQ ID NO: 26083 - RNA, 20 nt, Artificial Sequence
  spacer sequence CTCN PAM
ccaucacacccggcuaaguu

SEQ ID NO: 26084 - RNA, 20 nt, Artificial Sequence
  spacer sequence CTCN PAM
gcugcccaaguggcugggac

SEQ ID NO: 26085 - RNA, 20 nt, Artificial Sequence
  spacer sequence CTCN PAM
ugccucagcugcccaagugg

SEQ ID NO: 26086 - RNA, 20 nt, Artificial Sequence
  spacer sequence CTCN PAM
agggauucuccugccucagc

SEQ ID NO: 26087 - RNA, 20 nt, Artificial Sequence
  spacer sequence CTCN PAM
ugggcucaagggauucuccu

SEQ ID NO: 26088 - RNA, 20 nt, Artificial Sequence
  spacer sequence CTCN PAM
accuccugggcucaagggau

SEQ ID NO: 26089 - RNA, 20 nt, Artificial Sequence
  spacer sequence CTCN PAM
cugcagccucaaccuccugg

SEQ ID NO: 26090 - RNA, 20 nt, Artificial Sequence
  spacer sequence CTCN PAM
aggcugggcaacagagugag

SEQ ID NO: 26091 - RNA, 20 nt, Artificial Sequence
  spacer sequence CTCN PAM
guugcccagccuggagugca

SEQ ID NO: 26092 - RNA, 20 nt, Artificial Sequence
  spacer sequence CTCN PAM
cucuguugcccagccuggag

SEQ ID NO: 26093 - RNA, 20 nt, Artificial Sequence
  spacer sequence CTCN PAM
aaaaacaaacaaaaaaaaga

SEQ ID NO: 26094 - RNA, 20 nt, Artificial Sequence
  spacer sequence CTCN PAM
caaagucuuuuuuuuguuug

SEQ ID NO: 26095 - RNA, 20 nt, Artificial Sequence
  spacer sequence CTCN PAM
agugauccgccugccacagc

SEQ ID NO: 26096 - RNA, 20 nt, Artificial Sequence
  spacer sequence CTCN PAM
ugaccucaagugauccgccu

SEQ ID NO: 26097 - RNA, 20 nt, Artificial Sequence
  spacer sequence CTCN PAM
ccaaauagugaaacccuguc

SEQ ID NO: 26098 - RNA, 20 nt, Artificial Sequence
  spacer sequence CTCN PAM
acccaaaaaauacaaaaauu

SEQ ID NO: 26099 - RNA, 20 nt, Artificial Sequence
  spacer sequence CTCN PAM
ggaggcugaggggggagaau

SEQ ID NO: 26100 - RNA, 20 nt, Artificial Sequence
  spacer sequence CTCN PAM
ugaguagcugggauuacagg

SEQ ID NO: 26101 - RNA, 20 nt, Artificial Sequence
  spacer sequence CTCN PAM
gccuccugaguagcugggau

SEQ ID NO: 26102 - RNA, 20 nt, Artificial Sequence
  spacer sequence CTCN PAM
ccccucagccuccugaguag

SEQ ID NO: 26103 - RNA, 20 nt, Artificial Sequence
  spacer sequence CTCN PAM
agcaauucuccccccucagc

SEQ ID NO: 26104 - RNA, 20 nt, Artificial Sequence
  spacer sequence CTCN PAM
ggggcucaagcaauucuccc

SEQ ID NO: 26105 - RNA, 20 nt, Artificial Sequence
  spacer sequence CTCN PAM
gucuccggggcucaagcaau

SEQ ID NO: 26106 - RNA, 20 nt, Artificial Sequence
  spacer sequence CTCN PAM
cugcaaccucugucuccggg

SEQ ID NO: 26107 - RNA, 20 nt, Artificial Sequence
  spacer sequence CTCN PAM
gcucgcugcaaccucugucu

SEQ ID NO: 26108 - RNA, 20 nt, Artificial Sequence
  spacer sequence CTCN PAM
agccugggcgacagagcgag

SEQ ID NO: 26109 - RNA, 20 nt, Artificial Sequence
  spacer sequence CTCN PAM
gucgcccaggcuggagugca

SEQ ID NO: 26110 - RNA, 20 nt, Artificial Sequence
  spacer sequence CTCN PAM
cucugucgcccaggcuggag

SEQ ID NO: 26111 - RNA, 20 nt, Artificial Sequence
  spacer sequence CTCN PAM
aucuaaaaauaauaauaaua

SEQ ID NO: 26112 - RNA, 20 nt, Artificial Sequence
  spacer sequence CTCN PAM
ugcccauaaucccagcacuu

SEQ ID NO: 26113 - RNA, 20 nt, Artificial Sequence
  spacer sequence CTCN PAM
uaaagugcugggauuauggg

SEQ ID NO: 26114 - RNA, 20 nt, Artificial Sequence
  spacer sequence CTCN PAM
gucuccuaaagugcugggau

SEQ ID NO: 26115 - RNA, 20 nt, Artificial Sequence
  spacer sequence CTCN PAM
ugauccgacugccucagucu

SEQ ID NO: 26116 - RNA, 20 nt, Artificial Sequence
  spacer sequence CTCN PAM
ugaccucgugauccgacugc

SEQ ID NO: 26117 - RNA, 20 nt, Artificial Sequence
  spacer sequence CTCN PAM
gucucuacuaaaaauacaaa

SEQ ID NO: 26118 - RNA, 20 nt, Artificial Sequence
  spacer sequence CTCN PAM
acuaaaaauacaaaaaaauu

SEQ ID NO: 26119 - RNA, 20 nt, Artificial Sequence
  spacer sequence CTCN PAM
aagaggcugaggcaggagaa

SEQ ID NO: 26120 - RNA, 20 nt, Artificial Sequence
  spacer sequence CTCN PAM
uggaguagcugggacuacag

SEQ ID NO: 26121 - RNA, 20 nt, Artificial Sequence
  spacer sequence CTCN PAM
gccucuuggaguagcuggga

SEQ ID NO: 26122 - RNA, 20 nt, Artificial Sequence
  spacer sequence CTCN PAM
ugccucagccucuuggagua

SEQ ID NO: 26123 - RNA, 20 nt, Artificial Sequence
  spacer sequence CTCN PAM
cggguucacgccauucuccu

SEQ ID NO: 26124 - RNA, 20 nt, Artificial Sequence
  spacer sequence CTCN PAM
accucccggguucacgccau

SEQ ID NO: 26125 - RNA, 20 nt, Artificial Sequence
  spacer sequence CTCN PAM
agccugggcgacagagcgag

SEQ ID NO: 26126 - RNA, 20 nt, Artificial Sequence
  spacer sequence CTCN PAM
gucgcccaggcuggagugca

SEQ ID NO: 26127 - RNA, 20 nt, Artificial Sequence
  spacer sequence CTCN PAM
cucugucgcccaggcuggag

SEQ ID NO: 26128 - RNA, 20 nt, Artificial Sequence
  spacer sequence CTCN PAM
aucucaaaaaaaaaaaaaaa

SEQ ID NO: 26129 - RNA, 20 nt, Artificial Sequence
  spacer sequence CTCN PAM
aaaaaaaaaaaaaaaaagaa

SEQ ID NO: 26130 - RNA, 20 nt, Artificial Sequence
  spacer sequence CTCN PAM
ucuuuucuuuuucuuucuuc

SEQ ID NO: 26131 - RNA, 20 nt, Artificial Sequence
  spacer sequence CTCN PAM
uuuggaaacgggggaacuua

SEQ ID NO: 26132 - RNA, 20 nt, Artificial Sequence
  spacer sequence CTCN PAM
gaccgcagaugggacggugg

SEQ ID NO: 26133 - RNA, 20 nt, Artificial Sequence
  spacer sequence CTCN PAM
cgccuguaaucccagcacuu

SEQ ID NO: 26134 - RNA, 20 nt, Artificial Sequence
  spacer sequence CTCN PAM
caaagugcugggauuacagg

SEQ ID NO: 26135 - RNA, 20 nt, Artificial Sequence
  spacer sequence CTCN PAM
gccucccaaagugcugggau

SEQ ID NO: 26136 - RNA, 20 nt, Artificial Sequence
  spacer sequence CTCN PAM
ugauccgcccgccucggccu

SEQ ID NO: 26137 - RNA, 20 nt, Artificial Sequence
  spacer sequence CTCN PAM
ugaccucgugauccgcccgc

SEQ ID NO: 26138 - RNA, 20 nt, Artificial Sequence
  spacer sequence CTCN PAM
aucuccugaccucgugaucc

SEQ ID NO: 26139 - RNA, 20 nt, Artificial Sequence
  spacer sequence CTCN PAM
acuaaaaauacaaaaaauua

SEQ ID NO: 26140 - RNA, 20 nt, Artificial Sequence
  spacer sequence CTCN PAM
ggaggcugaggcaggagaau

SEQ ID NO: 26141 - RNA, 20 nt, Artificial Sequence
  spacer sequence CTCN PAM
cgaguagcugggacuacagg

SEQ ID NO: 26142 - RNA, 20 nt, Artificial Sequence
  spacer sequence CTCN PAM
gccucccgaguagcugggac

SEQ ID NO: 26143 - RNA, 20 nt, Artificial Sequence
  spacer sequence CTCN PAM
ugccucagccucccgaguag

SEQ ID NO: 26144 - RNA, 20 nt, Artificial Sequence
  spacer sequence CTCN PAM
auucuccugccucagccucc

SEQ ID NO: 26145 - RNA, 20 nt, Artificial Sequence
  spacer sequence CTCN PAM
cggguucacuccauucuccu

SEQ ID NO: 26146 - RNA, 20 nt, Artificial Sequence
  spacer sequence CTCN PAM
gccucccggguucacuccau

SEQ ID NO: 26147 - RNA, 20 nt, Artificial Sequence
  spacer sequence CTCN PAM
ccgcaaccuccgccucccgg

SEQ ID NO: 26148 - RNA, 20 nt, Artificial Sequence
  spacer sequence CTCN PAM
gcucaccgcaaccuccgccu

SEQ ID NO: 26149 - RNA, 20 nt, Artificial Sequence
  spacer sequence CTCN PAM
agccuggggacagcgagacu

SEQ ID NO: 26150 - RNA, 20 nt, Artificial Sequence
  spacer sequence CTCN PAM
cuguccccaggcuggagugc

SEQ ID NO: 26151 - RNA, 20 nt, Artificial Sequence
  spacer sequence CTCN PAM
gucucaaaaaaaaaaaaauu

SEQ ID NO: 26152 - RNA, 20 nt, Artificial Sequence
  spacer sequence CTCN PAM
aaaaaaaaaaaauuccauau

SEQ ID NO: 26153 - RNA, 20 nt, Artificial Sequence
  spacer sequence CTCN PAM
ugcucacguugccacugccu

SEQ ID NO: 26154 - RNA, 20 nt, Artificial Sequence
  spacer sequence CTCN PAM
cguugccacugccuacggga

SEQ ID NO: 26155 - RNA, 20 nt, Artificial Sequence
  spacer sequence CTCN PAM
ugggcuacaaaucuguggcu

SEQ ID NO: 26156 - RNA, 20 nt, Artificial Sequence
  spacer sequence CTCN PAM
cacacacccaggcacaggca

SEQ ID NO: 26157 - RNA, 20 nt, Artificial Sequence
  spacer sequence CTCN PAM
acccgugaggugugugugac

SEQ ID NO: 26158 - RNA, 20 nt, Artificial Sequence
  spacer sequence CTCN PAM
cggguggagccucccacaca

SEQ ID NO: 26159 - RNA, 20 nt, Artificial Sequence
  spacer sequence CTCN PAM
cuguuugauguucacacuga

SEQ ID NO: 26160 - RNA, 20 nt, Artificial Sequence
  spacer sequence CTCN PAM
gucuucgugcaggaugcguc

SEQ ID NO: 26161 - RNA, 20 nt, Artificial Sequence
  spacer sequence CTCN PAM
gccucugucuucgugcagga

SEQ ID NO: 26162 - RNA, 20 nt, Artificial Sequence
  spacer sequence CTCN PAM
agccucugccucugucuucg

SEQ ID NO: 26163 - RNA, 20 nt, Artificial Sequence
  spacer sequence CTCN PAM
agguuccugggcuuguggcc

SEQ ID NO: 26164 - RNA, 20 nt, Artificial Sequence
  spacer sequence CTCN PAM
cggcuucugggggcuccagg

SEQ ID NO: 26165 - RNA, 20 nt, Artificial Sequence
  spacer sequence CTCN PAM
cacggcuucugggggcucca

SEQ ID NO: 26166 - RNA, 20 nt, Artificial Sequence
  spacer sequence CTCN PAM
cuuggagacuucggagggaa

SEQ ID NO: 26167 - RNA, 20 nt, Artificial Sequence
  spacer sequence CTCN PAM
aagggaggaaccuuccugcc

SEQ ID NO: 26168 - RNA, 20 nt, Artificial Sequence
  spacer sequence CTCN PAM
gaagucuccaagggaggaac

SEQ ID NO: 26169 - RNA, 20 nt, Artificial Sequence
  spacer sequence CTCN PAM
aaaaacaaaacaaaacaaaa

SEQ ID NO: 26170 - RNA, 20 nt, Artificial Sequence
  spacer sequence CTCN PAM
agccugggcgacagaacgca

SEQ ID NO: 26171 - RNA, 20 nt, Artificial Sequence
  spacer sequence CTCN PAM
gcucacuucagccuccacug

SEQ ID NO: 26172 - RNA, 20 nt, Artificial Sequence
  spacer sequence CTCN PAM
cuucagccuccacugcccag

SEQ ID NO: 26173 - RNA, 20 nt, Artificial Sequence
  spacer sequence CTCN PAM
acugcccaggcucaagcaau

SEQ ID NO: 26174 - RNA, 20 nt, Artificial Sequence
  spacer sequence CTCN PAM
agcaauccucccaccucagc

SEQ ID NO: 26175 - RNA, 20 nt, Artificial Sequence
  spacer sequence CTCN PAM
caccucagccucccgaguag

SEQ ID NO: 26176 - RNA, 20 nt, Artificial Sequence
  spacer sequence CTCN PAM
gccucccgaguagccgggac

SEQ ID NO: 26177 - RNA, 20 nt, Artificial Sequence
  spacer sequence CTCN PAM
cgaguagccgggacuguagg

SEQ ID NO: 26178 - RNA, 20 nt, Artificial Sequence
  spacer sequence CTCN PAM
ggaggcugaggugggaggau

SEQ ID NO: 26179 - RNA, 20 nt, Artificial Sequence
  spacer sequence CTCN PAM
ugccuacagucccggcuacu

SEQ ID NO: 26180 - RNA, 20 nt, Artificial Sequence
  spacer sequence CTCN PAM
acauuaugauaacaaaaagu

SEQ ID NO: 26181 - RNA, 20 nt, Artificial Sequence
  spacer sequence CTCN PAM
cuauguugcccaggcugguc

SEQ ID NO: 26182 - RNA, 20 nt, Artificial Sequence
  spacer sequence CTCN PAM
agcgauucacccgccuccca

SEQ ID NO: 26183 - RNA, 20 nt, Artificial Sequence
  spacer sequence CTCN PAM
caaggugcugggauuacagg

SEQ ID NO: 26184 - RNA, 20 nt, Artificial Sequence
  spacer sequence CTCN PAM
caccuguaaucccagcaccu

SEQ ID NO: 26185 - RNA, 20 nt, Artificial Sequence
  spacer sequence CTCN PAM
ucaggguggcggcucacacc

SEQ ID NO: 26186 - RNA, 20 nt, Artificial Sequence
  spacer sequence CTCN PAM
gggaccgcgggagaauagau

SEQ ID NO: 26187 - RNA, 20 nt, Artificial Sequence
  spacer sequence CTCN PAM
cgcggucccggagcccagaa

SEQ ID NO: 26188 - RNA, 20 nt, Artificial Sequence
  spacer sequence CTCN PAM
cuuacagccacacguugcag

SEQ ID NO: 26189 - RNA, 20 nt, Artificial Sequence
  spacer sequence CTCN PAM
aaucgauccuuaacucccuu

SEQ ID NO: 26190 - RNA, 20 nt, Artificial Sequence
  spacer sequence CTCN PAM
ucucaaaucgauccuuaacu

SEQ ID NO: 26191 - RNA, 20 nt, Artificial Sequence
  spacer sequence CTCN PAM
ggacaccagccugcugguuu

SEQ ID NO: 26192 - RNA, 20 nt, Artificial Sequence
  spacer sequence CTCN PAM
ucucaggacaccagccugcu

SEQ ID NO: 26193 - RNA, 20 nt, Artificial Sequence
  spacer sequence CTCN PAM
ucuucucaggacaccagccu

SEQ ID NO: 26194 - RNA, 20 nt, Artificial Sequence
  spacer sequence CTCN PAM
ccucuucucaggacaccagc

SEQ ID NO: 26195 - RNA, 20 nt, Artificial Sequence
  spacer sequence CTCN PAM
cuccucuucucaggacacca

SEQ ID NO: 26196 - RNA, 20 nt, Artificial Sequence
  spacer sequence CTCN PAM
cucuccucuucucaggacac

SEQ ID NO: 26197 - RNA, 20 nt, Artificial Sequence
  spacer sequence CTCN PAM
ccgucucucucuccucuucu

SEQ ID NO: 26198 - RNA, 20 nt, Artificial Sequence
  spacer sequence CTCN PAM
acaagaccgucuccccgucu

SEQ ID NO: 26199 - RNA, 20 nt, Artificial Sequence
  spacer sequence CTCN PAM
gucuccacaagaccgucucc

SEQ ID NO: 26200 - RNA, 20 nt, Artificial Sequence
  spacer sequence CTCN PAM
gccuccgucuccacaagacc

SEQ ID NO: 26201 - RNA, 20 nt, Artificial Sequence
  spacer sequence CTCN PAM
agucucugccuccgucucca

SEQ ID NO: 26202 - RNA, 20 nt, Artificial Sequence
  spacer sequence CTCN PAM
cgguccaggggcccgggaac

SEQ ID NO: 26203 - RNA, 20 nt, Artificial Sequence
  spacer sequence CTCN PAM
cccgguccaggggcccggga

SEQ ID NO: 26204 - RNA, 20 nt, Artificial Sequence
  spacer sequence CTCN PAM
uugcagacccucugggaagc

SEQ ID NO: 26205 - RNA, 20 nt, Artificial Sequence
  spacer sequence CTCN PAM
gggaagcucguucaccggca

SEQ ID NO: 26206 - RNA, 20 nt, Artificial Sequence
  spacer sequence CTCN PAM
uucaccggcauuucugucuu

SEQ ID NO: 26207 - RNA, 20 nt, Artificial Sequence
  spacer sequence CTCN PAM
ggcagcggcuugaggguccu

SEQ ID NO: 26208 - RNA, 20 nt, Artificial Sequence
  spacer sequence CTCN PAM
agccgcugccagagccgaag

SEQ ID NO: 26209 - RNA, 20 nt, Artificial Sequence
  spacer sequence CTCN PAM
uguccuccugaccuggccuc

SEQ ID NO: 26210 - RNA, 20 nt, Artificial Sequence
  spacer sequence CTCN PAM
ugaccuggccuccagugcag

SEQ ID NO: 26211 - RNA, 20 nt, Artificial Sequence
  spacer sequence CTCN PAM
agugcaggagggacaugguu

SEQ ID NO: 26212 - RNA, 20 nt, Artificial Sequence
  spacer sequence CTCN PAM
ugcacuggaggccaggucag

SEQ ID NO: 26213 - RNA, 20 nt, Artificial Sequence
  spacer sequence CTCN PAM
ggugugggaaccaugucccu

SEQ ID NO: 26214 - RNA, 20 nt, Artificial Sequence
  spacer sequence CTCN PAM
ggcaccaacuaacccauccc

SEQ ID NO: 26215 - RNA, 20 nt, Artificial Sequence
  spacer sequence CTCN PAM
ccacccucacagcucuacga

SEQ ID NO: 26216 - RNA, 20 nt, Artificial Sequence
  spacer sequence CTCN PAM
acccucacagcucuacgaac

SEQ ID NO: 26217 - RNA, 20 nt, Artificial Sequence
  spacer sequence CTCN PAM
cagcucuacgaacucgacgg

SEQ ID NO: 26218 - RNA, 20 nt, Artificial Sequence
  spacer sequence CTCN PAM
acgaacucgacggggacccc

SEQ ID NO: 26219 - RNA, 20 nt, Artificial Sequence
  spacer sequence CTCN PAM
acggggaccccaagaggaag

SEQ ID NO: 26220 - RNA, 20 nt, Artificial Sequence
  spacer sequence CTCN PAM
ugggguccccgucgaguucg

SEQ ID NO: 26221 - RNA, 20 nt, Artificial Sequence
  spacer sequence CTCN PAM
cuucugcaugaagcugaaca

SEQ ID NO: 26222 - RNA, 20 nt, Artificial Sequence
  spacer sequence CTCN PAM
ccucgcuucugcaugaagcu

SEQ ID NO: 26223 - RNA, 20 nt, Artificial Sequence
  spacer sequence CTCN PAM
gcccccaccccgcuggaggg

SEQ ID NO: 26224 - RNA, 20 nt, Artificial Sequence
  spacer sequence CTCN PAM
agcggggugggggcagaggg

SEQ ID NO: 26225 - RNA, 20 nt, Artificial Sequence
  spacer sequence CTCN PAM
cuccagcggggugggggcag

SEQ ID NO: 26226 - RNA, 20 nt, Artificial Sequence
  spacer sequence CTCN PAM
uacagcccuguuucugugac

SEQ ID NO: 26227 - RNA, 20 nt, Artificial Sequence
  spacer sequence CTCN PAM
agguaugucggggcgguggu

SEQ ID NO: 26228 - RNA, 20 nt, Artificial Sequence
  spacer sequence CTCN PAM
ccaccgccccgacauaccug

SEQ ID NO: 26229 - RNA, 20 nt, Artificial Sequence
  spacer sequence CTCN PAM
agccacggggugcucaccac

SEQ ID NO: 26230 - RNA, 20 nt, Artificial Sequence
  spacer sequence CTCN PAM
uaaaucgggagggacuucag

SEQ ID NO: 26231 - RNA, 20 nt, Artificial Sequence
  spacer sequence CTCN PAM
cgauuuaggagccuuggaug

SEQ ID NO: 26232 - RNA, 20 nt, Artificial Sequence
  spacer sequence CTCN PAM
auggcaggauguguuucccc

SEQ ID NO: 26233 - RNA, 20 nt, Artificial Sequence
  spacer sequence CTCN PAM
cgcgucaaaccuccauggca

SEQ ID NO: 26234 - RNA, 20 nt, Artificial Sequence
  spacer sequence CTCN PAM
caggcgugccucccgcguca

SEQ ID NO: 26235 - RNA, 20 nt, Artificial Sequence
  spacer sequence CTCN PAM
gggccccaacccagaacaga

SEQ ID NO: 26236 - RNA, 20 nt, Artificial Sequence
  spacer sequence CTCN PAM
uuagcauccagggugcagug

SEQ ID NO: 26237 - RNA, 20 nt, Artificial Sequence
  spacer sequence CTCN PAM
cccauuacccaguagugggg

SEQ ID NO: 26238 - RNA, 20 nt, Artificial Sequence
  spacer sequence CTCN PAM
guguuuagggagugggguca

SEQ ID NO: 26239 - RNA, 20 nt, Artificial Sequence
  spacer sequence CTCN PAM
cuaaacacagaggcugguuc

SEQ ID NO: 26240 - RNA, 20 nt, Artificial Sequence
  spacer sequence CTCN PAM
cggccgggcggggggcuucu

SEQ ID NO: 26241 - RNA, 20 nt, Artificial Sequence
  spacer sequence CTCN PAM
aagccaucucgcggccgggc

SEQ ID NO: 26242 - RNA, 20 nt, Artificial Sequence
  spacer sequence CTCN PAM
uggcggccaaugcgacauuu

SEQ ID NO: 26243 - RNA, 20 nt, Artificial Sequence
  spacer sequence CTCN PAM
aaugucgcauuggccgccau

SEQ ID NO: 26244 - RNA, 20 nt, Artificial Sequence
  spacer sequence CTCN PAM
ccucuucccaccagggccuc

SEQ ID NO: 26245 - RNA, 20 nt, Artificial Sequence
  spacer sequence CTCN PAM
ucccaccagggccucaguuu

SEQ ID NO: 26246 - RNA, 20 nt, Artificial Sequence
  spacer sequence CTCN PAM
guuuccccaucuguaaaaac

SEQ ID NO: 26247 - RNA, 20 nt, Artificial Sequence
  spacer sequence CTCN PAM
guggccagcagguaccccag

SEQ ID NO: 26248 - RNA, 20 nt, Artificial Sequence
  spacer sequence CTCN PAM
gcacaucugggguaccugcu

SEQ ID NO: 26249 - RNA, 20 nt, Artificial Sequence
  spacer sequence CTCN PAM
gugcccccaaagucuccugg

SEQ ID NO: 26250 - RNA, 20 nt, Artificial Sequence
  spacer sequence CTCN PAM
uggccuagagagggcagguc

SEQ ID NO: 26251 - RNA, 20 nt, Artificial Sequence
  spacer sequence CTCN PAM
aggccaggagacuuuggggg

SEQ ID NO: 26252 - RNA, 20 nt, Artificial Sequence
  spacer sequence CTCN PAM
cuaggccaggagacuuuggg

SEQ ID NO: 26253 - RNA, 20 nt, Artificial Sequence
  spacer sequence CTCN PAM
guuuccccaccuggacacca

SEQ ID NO: 26254 - RNA, 20 nt, Artificial Sequence
  spacer sequence CTCN PAM
gacgaccaaggguagccggg

SEQ ID NO: 26255 - RNA, 20 nt, Artificial Sequence
  spacer sequence CTCN PAM
aagcugggguggggccuggg

SEQ ID NO: 26256 - RNA, 20 nt, Artificial Sequence
  spacer sequence CTCN PAM
gccccguggucacucuaagc

SEQ ID NO: 26257 - RNA, 20 nt, Artificial Sequence
  spacer sequence CTCN PAM
cugccccguggucacucuaa

SEQ ID NO: 26258 - RNA, 20 nt, Artificial Sequence
  spacer sequence CTCN PAM
cucugccccguggucacucu

SEQ ID NO: 26259 - RNA, 20 nt, Artificial Sequence
  spacer sequence CTCN PAM
ccuccaaguccucgucggcc

SEQ ID NO: 26260 - RNA, 20 nt, Artificial Sequence
  spacer sequence CTCN PAM
aaguccucgucggccggaga

SEQ ID NO: 26261 - RNA, 20 nt, Artificial Sequence
  spacer sequence CTCN PAM
ucggccggagaggguccuag

SEQ ID NO: 26262 - RNA, 20 nt, Artificial Sequence
  spacer sequence CTCN PAM
ggccgacgaggacuuggagg

SEQ ID NO: 26263 - RNA, 20 nt, Artificial Sequence
  spacer sequence CTCN PAM
ccggccgacgaggacuugga

SEQ ID NO: 26264 - RNA, 20 nt, Artificial Sequence
  spacer sequence CTCN PAM
uaggacccucuccggccgac

SEQ ID NO: 26265 - RNA, 20 nt, Artificial Sequence
  spacer sequence CTCN PAM
uaccuggcagcagacgcucc

SEQ ID NO: 26266 - RNA, 20 nt, Artificial Sequence
  spacer sequence CTCN PAM
ucuagggcagggagcuagcu

SEQ ID NO: 26267 - RNA, 20 nt, Artificial Sequence
  spacer sequence CTCN PAM
agggcagggagcuagcuccg

SEQ ID NO: 26268 - RNA, 20 nt, Artificial Sequence
  spacer sequence CTCN PAM
cugcccuagaggagugucca

SEQ ID NO: 26269 - RNA, 20 nt, Artificial Sequence
  spacer sequence CTCN PAM
gauccccacuguucagacgg

SEQ ID NO: 26270 - RNA, 20 nt, Artificial Sequence
  spacer sequence CTCN PAM
cccgucugaacaguggggau

SEQ ID NO: 26271 - RNA, 20 nt, Artificial Sequence
  spacer sequence CTCN PAM
ucccccgucugaacaguggg

SEQ ID NO: 26272 - RNA, 20 nt, Artificial Sequence
  spacer sequence CTCN PAM
gugggccccaaggccuccuc

SEQ ID NO: 26273 - RNA, 20 nt, Artificial Sequence
  spacer sequence CTCN PAM
gccccaccccuuccgaccuc

SEQ ID NO: 26274 - RNA, 20 nt, Artificial Sequence
  spacer sequence CTCN PAM
gucccugcacuuggggccgu

SEQ ID NO: 26275 - RNA, 20 nt, Artificial Sequence
  spacer sequence CTCN PAM
gcccaccccuccccuggcuu

SEQ ID NO: 26276 - RNA, 20 nt, Artificial Sequence
  spacer sequence CTCN PAM
ccuggcuucuauaaacacag

SEQ ID NO: 26277 - RNA, 20 nt, Artificial Sequence
  spacer sequence CTCN PAM
uucccuuccgggcggcuggc

SEQ ID NO: 26278 - RNA, 20 nt, Artificial Sequence
  spacer sequence CTCN PAM
uccuucccuuccgggcggcu

SEQ ID NO: 26279 - RNA, 20 nt, Artificial Sequence
  spacer sequence CTCN PAM
uccuccuucccuuccgggcg

SEQ ID NO: 26280 - RNA, 20 nt, Artificial Sequence
  spacer sequence CTCN PAM
gaguuaaccccucccgugcu

SEQ ID NO: 26281 - RNA, 20 nt, Artificial Sequence
  spacer sequence CTCN PAM
gaggccgcugggcagugugg

SEQ ID NO: 26282 - RNA, 20 nt, Artificial Sequence
  spacer sequence CTCN PAM
cgugcugggaacagaggauc

SEQ ID NO: 26283 - RNA, 20 nt, Artificial Sequence
  spacer sequence CTCN PAM
guucccagcacgggaggggu

SEQ ID NO: 26284 - RNA, 20 nt, Artificial Sequence
  spacer sequence CTCN PAM
uguguuauccuccaaggcca

SEQ ID NO: 26285 - RNA, 20 nt, Artificial Sequence
  spacer sequence CTCN PAM
aaggccaggcuugaccaggg

SEQ ID NO: 26286 - RNA, 20 nt, Artificial Sequence
  spacer sequence CTCN PAM
cagggggcagugggcccugg

SEQ ID NO: 26287 - RNA, 20 nt, Artificial Sequence
  spacer sequence CTCN PAM
ccaugacccuuuaucauccu

SEQ ID NO: 26288 - RNA, 20 nt, Artificial Sequence
  spacer sequence CTCN PAM
gcccugaccacucugcugug

SEQ ID NO: 26289 - RNA, 20 nt, Artificial Sequence
  spacer sequence CTCN PAM
gcuguggggcuccgagcucc

SEQ ID NO: 26290 - RNA, 20 nt, Artificial Sequence
  spacer sequence CTCN PAM
gagcuccuggguccaaagcc

SEQ ID NO: 26291 - RNA, 20 nt, Artificial Sequence
  spacer sequence CTCN PAM
gagccccacagcagaguggu

SEQ ID NO: 26292 - RNA, 20 nt, Artificial Sequence
  spacer sequence CTCN PAM
uggguccaaagccaacccgu

SEQ ID NO: 26293 - RNA, 20 nt, Artificial Sequence
  spacer sequence CTCN PAM
ccgugcuuucuaaguacccc

SEQ ID NO: 26294 - RNA, 20 nt, Artificial Sequence
  spacer sequence CTCN PAM
caccuguaaucccagcacuu

SEQ ID NO: 26295 - RNA, 20 nt, Artificial Sequence
  spacer sequence CTCN PAM
caaagugcugggauuacagg

SEQ ID NO: 26296 - RNA, 20 nt, Artificial Sequence
  spacer sequence CTCN PAM
gccucccaaagugcugggau

SEQ ID NO: 26297 - RNA, 20 nt, Artificial Sequence
  spacer sequence CTCN PAM
agugauccaccugccucggc

SEQ ID NO: 26298 - RNA, 20 nt, Artificial Sequence
  spacer sequence CTCN PAM
ugaccucaagugauccaccu

SEQ ID NO: 26299 - RNA, 20 nt, Artificial Sequence
  spacer sequence CTCN PAM
acuaaaaguacaaaaauuga

SEQ ID NO: 26300 - RNA, 20 nt, Artificial Sequence
  spacer sequence CTCN PAM
caaguagcugggauuacagg

SEQ ID NO: 26301 - RNA, 20 nt, Artificial Sequence
  spacer sequence CTCN PAM
gccucccaaguagcugggau

SEQ ID NO: 26302 - RNA, 20 nt, Artificial Sequence
  spacer sequence CTCN PAM
ugccucagccucccaaguag

SEQ ID NO: 26303 - RNA, 20 nt, Artificial Sequence
  spacer sequence CTCN PAM
uggauucaagcaauucuccu

SEQ ID NO: 26304 - RNA, 20 nt, Artificial Sequence
  spacer sequence CTCN PAM
gccuccuggauucaagcaau

SEQ ID NO: 26305 - RNA, 20 nt, Artificial Sequence
  spacer sequence CTCN PAM
cugcaaccucugccuccugg

SEQ ID NO: 26306 - RNA, 20 nt, Artificial Sequence
  spacer sequence CTCN PAM
gcucacugcaaccucugccu

SEQ ID NO: 26307 - RNA, 20 nt, Artificial Sequence
  spacer sequence CTCN PAM
agccugggugacagagggag

SEQ ID NO: 26308 - RNA, 20 nt, Artificial Sequence
  spacer sequence CTCN PAM
gucacccaggcuagagugca

SEQ ID NO: 26309 - RNA, 20 nt, Artificial Sequence
  spacer sequence CTCN PAM
cucugucacccaggcuagag

SEQ ID NO: 26310 - RNA, 20 nt, Artificial Sequence
  spacer sequence CTCN PAM
aacaaacaaaaagcaggcau

SEQ ID NO: 26311 - RNA, 20 nt, Artificial Sequence
  spacer sequence CTCN PAM
ugagugugggugagaugggg

SEQ ID NO: 26312 - RNA, 20 nt, Artificial Sequence
  spacer sequence CTCN PAM
ugagcagccuaccaugccug

SEQ ID NO: 26313 - RNA, 20 nt, Artificial Sequence
  spacer sequence CTCN PAM
cccacacucaugagcagccu

SEQ ID NO: 26314 - RNA, 20 nt, Artificial Sequence
  spacer sequence CTCN PAM
cggccccacgugccacgggc

SEQ ID NO: 26315 - RNA, 20 nt, Artificial Sequence
  spacer sequence CTCN PAM
cucuccaagcugggaauucc

SEQ ID NO: 26316 - RNA, 20 nt, Artificial Sequence
  spacer sequence CTCN PAM
ccaagcugggaauuccuaca

SEQ ID NO: 26317 - RNA, 20 nt, Artificial Sequence
  spacer sequence CTCN PAM
aagcugggaauuccuacagg

SEQ ID NO: 26318 - RNA, 20 nt, Artificial Sequence
  spacer sequence CTCN PAM
uguccuguaggaauucccag

SEQ ID NO: 26319 - RNA, 20 nt, Artificial Sequence
  spacer sequence CTCN PAM
cugucuccuguccuguagga

SEQ ID NO: 26320 - RNA, 20 nt, Artificial Sequence
  spacer sequence CTCN PAM
uaugcgucccucaaaaccca

SEQ ID NO: 26321 - RNA, 20 nt, Artificial Sequence
  spacer sequence CTCN PAM
aaacccagccucaaagcucc

SEQ ID NO: 26322 - RNA, 20 nt, Artificial Sequence
  spacer sequence CTCN PAM
aagcucccucuuccuuggcu

SEQ ID NO: 26323 - RNA, 20 nt, Artificial Sequence
  spacer sequence CTCN PAM
cucuuccuuggcuuccucca

SEQ ID NO: 26324 - RNA, 20 nt, Artificial Sequence
  spacer sequence CTCN PAM
uccuuggcuuccuccaggag

SEQ ID NO: 26325 - RNA, 20 nt, Artificial Sequence
  spacer sequence CTCN PAM
aggagcuuccugcucuguaa

SEQ ID NO: 26326 - RNA, 20 nt, Artificial Sequence
  spacer sequence CTCN PAM
uggaggaagccaaggaagag

SEQ ID NO: 26327 - RNA, 20 nt, Artificial Sequence
  spacer sequence CTCN PAM
guaaugggggcccuuggagc

SEQ ID NO: 26328 - RNA, 20 nt, Artificial Sequence
  spacer sequence CTCN PAM
aagggcccccauuacagagc

SEQ ID NO: 26329 - RNA, 20 nt, Artificial Sequence
  spacer sequence CTCN PAM
gcuccaagggcccccauuac

SEQ ID NO: 26330 - RNA, 20 nt, Artificial Sequence
  spacer sequence CTCN PAM
ccuucacuccagacagagag

SEQ ID NO: 26331 - RNA, 20 nt, Artificial Sequence
  spacer sequence CTCN PAM
uucacuccagacagagagaa

SEQ ID NO: 26332 - RNA, 20 nt, Artificial Sequence
  spacer sequence CTCN PAM
agacagagagaaauaauuuu

SEQ ID NO: 26333 - RNA, 20 nt, Artificial Sequence
  spacer sequence CTCN PAM
gucuggagugaaggagagga

SEQ ID NO: 26334 - RNA, 20 nt, Artificial Sequence
  spacer sequence CTCN PAM
cugucuggagugaaggagag

SEQ ID NO: 26335 - RNA, 20 nt, Artificial Sequence
  spacer sequence CTCN PAM
aacuaaauuucucagaauuc

SEQ ID NO: 26336 - RNA, 20 nt, Artificial Sequence
  spacer sequence CTCN PAM
gaauucucugggggcuagaa

SEQ ID NO: 26337 - RNA, 20 nt, Artificial Sequence
  spacer sequence CTCN PAM
gggggcuagaagugagggag

SEQ ID NO: 26338 - RNA, 20 nt, Artificial Sequence
  spacer sequence CTCN PAM
cuucuagcccccagagaauu

SEQ ID NO: 26339 - RNA, 20 nt, Artificial Sequence
  spacer sequence CTCN PAM
cucacuucuagcccccagag

SEQ ID NO: 26340 - RNA, 20 nt, Artificial Sequence
  spacer sequence CTCN PAM
ccccucagcagcagcagcug

SEQ ID NO: 26341 - RNA, 20 nt, Artificial Sequence
  spacer sequence CTCN PAM
ccucagcagcagcagcugga

SEQ ID NO: 26342 - RNA, 20 nt, Artificial Sequence
  spacer sequence CTCN PAM
gcagcagcagcuggaccacc

SEQ ID NO: 26343 - RNA, 20 nt, Artificial Sequence
  spacer sequence CTCN PAM
ccacccuuccuuaucugggc

SEQ ID NO: 26344 - RNA, 20 nt, Artificial Sequence
  spacer sequence CTCN PAM
cagcuccuucuguaaacauc

SEQ ID NO: 26345 - RNA, 20 nt, Artificial Sequence
  spacer sequence CTCN PAM
uucuguaaacauccuccucc

SEQ ID NO: 26346 - RNA, 20 nt, Artificial Sequence
  spacer sequence CTCN PAM
ucccgcccacugcagagcca

SEQ ID NO: 26347 - RNA, 20 nt, Artificial Sequence
  spacer sequence CTCN PAM
cgcccacugcagagccaggg

SEQ ID NO: 26348 - RNA, 20 nt, Artificial Sequence
  spacer sequence CTCN PAM
gcagugggcgggaggaggau

SEQ ID NO: 26349 - RNA, 20 nt, Artificial Sequence
  spacer sequence CTCN PAM
gcugcugauccuuuuuuuuu

SEQ ID NO: 26350 - RNA, 20 nt, Artificial Sequence
  spacer sequence CTCN PAM
aaaaaaaaaaaaaaaaagga

SEQ ID NO: 26351 - RNA, 20 nt, Artificial Sequence
  spacer sequence CTCN PAM
gucucaaaaaaaaaaaaaaa

SEQ ID NO: 26352 - RNA, 20 nt, Artificial Sequence
  spacer sequence CTCN PAM
gcaacaaaagcaaaacucug

SEQ ID NO: 26353 - RNA, 20 nt, Artificial Sequence
  spacer sequence CTCN PAM
agccucagcaacaaaagcaa

SEQ ID NO: 26354 - RNA, 20 nt, Artificial Sequence
  spacer sequence CTCN PAM
gcucucugcaaccuccaccu

SEQ ID NO: 26355 - RNA, 20 nt, Artificial Sequence
  spacer sequence CTCN PAM
cugcaaccuccaccucccag

SEQ ID NO: 26356 - RNA, 20 nt, Artificial Sequence
  spacer sequence CTCN PAM
gcaaccuccaccucccaggu

SEQ ID NO: 26357 - RNA, 20 nt, Artificial Sequence
  spacer sequence CTCN PAM
accucccagguucaagugau

SEQ ID NO: 26358 - RNA, 20 nt, Artificial Sequence
  spacer sequence CTCN PAM
cagguucaagugauuccccu

SEQ ID NO: 26359 - RNA, 20 nt, Artificial Sequence
  spacer sequence CTCN PAM
gccuccugaguagcugggau

SEQ ID NO: 26360 - RNA, 20 nt, Artificial Sequence
  spacer sequence CTCN PAM
ugaguagcugggauuacagg

SEQ ID NO: 26361 - RNA, 20 nt, Artificial Sequence
  spacer sequence CTCN PAM
ggaggcugaggcaggggaau

SEQ ID NO: 26362 - RNA, 20 nt, Artificial Sequence
  spacer sequence CTCN PAM
acuaaaaauacaaaaauuag

SEQ ID NO: 26363 - RNA, 20 nt, Artificial Sequence
  spacer sequence CTCN PAM
cuauuggccaggcuggucuc

SEQ ID NO: 26364 - RNA, 20 nt, Artificial Sequence
  spacer sequence CTCN PAM
aacuccugaccuugggugau

SEQ ID NO: 26365 - RNA, 20 nt, Artificial Sequence
  spacer sequence CTCN PAM
ugaccuugggugauccgccc

SEQ ID NO: 26366 - RNA, 20 nt, Artificial Sequence
  spacer sequence CTCN PAM
gccucccaaagugcuggaau

SEQ ID NO: 26367 - RNA, 20 nt, Artificial Sequence
  spacer sequence CTCN PAM
caaagugcuggaaugacagg

SEQ ID NO: 26368 - RNA, 20 nt, Artificial Sequence
  spacer sequence CTCN PAM
agccugucauuccagcacuu

SEQ ID NO: 26369 - RNA, 20 nt, Artificial Sequence
  spacer sequence CTCN PAM
gaggccuaaacugguguccc

SEQ ID NO: 26370 - RNA, 20 nt, Artificial Sequence
  spacer sequence CTCN PAM
gaguuugcaaaguaaaagua

SEQ ID NO: 26371 - RNA, 20 nt, Artificial Sequence
  spacer sequence CTCN PAM
ggacaccaguuuaggccuca

SEQ ID NO: 26372 - RNA, 20 nt, Artificial Sequence
  spacer sequence CTCN PAM
gcccggccccacucgggaca

SEQ ID NO: 26373 - RNA, 20 nt, Artificial Sequence
  spacer sequence CTCN PAM
gggcagguuuccgggccgau

SEQ ID NO: 26374 - RNA, 20 nt, Artificial Sequence
  spacer sequence CTCN PAM
ucucgcccaggcuguaaagu

SEQ ID NO: 26375 - RNA, 20 nt, Artificial Sequence
  spacer sequence CTCN PAM
cgcccaggcuguaaaguggg

SEQ ID NO: 26376 - RNA, 20 nt, Artificial Sequence
  spacer sequence CTCN PAM
cccaggcuguaaaguggguu

SEQ ID NO: 26377 - RNA, 20 nt, Artificial Sequence
  spacer sequence CTCN PAM
gacccgaucccaccugaaac

SEQ ID NO: 26378 - RNA, 20 nt, Artificial Sequence
  spacer sequence CTCN PAM
aaccugggaucuccuccauu

SEQ ID NO: 26379 - RNA, 20 nt, Artificial Sequence
  spacer sequence CTCN PAM
uccauucacuggggguuuug

SEQ ID NO: 26380 - RNA, 20 nt, Artificial Sequence
  spacer sequence CTCN PAM
auucacuggggguuuugcaa

SEQ ID NO: 26381 - RNA, 20 nt, Artificial Sequence
  spacer sequence CTCN PAM
gccacuuccaggcccuuccc

SEQ ID NO: 26382 - RNA, 20 nt, Artificial Sequence
  spacer sequence CTCN PAM
caccacccuccgccacuucc

SEQ ID NO: 26383 - RNA, 20 nt, Artificial Sequence
  spacer sequence CTCN PAM
accaggcagagggccggcug

SEQ ID NO: 26384 - RNA, 20 nt, Artificial Sequence
  spacer sequence CTCN PAM
gccuggucgaggccugcuac

SEQ ID NO: 26385 - RNA, 20 nt, Artificial Sequence
  spacer sequence CTCN PAM
cucagggcugcacccgcucu

SEQ ID NO: 26386 - RNA, 20 nt, Artificial Sequence
  spacer sequence CTCN PAM
gggcugcacccgcucuccag

SEQ ID NO: 26387 - RNA, 20 nt, Artificial Sequence
  spacer sequence CTCN PAM
ccagccagucacaucccaga

SEQ ID NO: 26388 - RNA, 20 nt, Artificial Sequence
  spacer sequence CTCN PAM
agccagucacaucccagaac

SEQ ID NO: 26389 - RNA, 20 nt, Artificial Sequence
  spacer sequence CTCN PAM
auguccacguccccaucccu

SEQ ID NO: 26390 - RNA, 20 nt, Artificial Sequence
  spacer sequence CTCN PAM
caccccauggugagugggca

SEQ ID NO: 26391 - RNA, 20 nt, Artificial Sequence
  spacer sequence CTCN PAM
ccauggggugggaggggacg

SEQ ID NO: 26392 - RNA, 20 nt, Artificial Sequence
  spacer sequence CTCN PAM
cuggucuucacugagcgccu

SEQ ID NO: 26393 - RNA, 20 nt, Artificial Sequence
  spacer sequence CTCN PAM
gugaagaccagugagggcag

SEQ ID NO: 26394 - RNA, 20 nt, Artificial Sequence
  spacer sequence CTCN PAM
guggcauacaguaggcgcuc

SEQ ID NO: 26395 - RNA, 20 nt, Artificial Sequence
  spacer sequence CTCN PAM
uaagugcagaauuucacgga

SEQ ID NO: 26396 - RNA, 20 nt, Artificial Sequence
  spacer sequence CTCN PAM
cuggccugacaguaggcaag

SEQ ID NO: 26397 - RNA, 20 nt, Artificial Sequence
  spacer sequence CTCN PAM
gcccagccccucccuggccu

SEQ ID NO: 26398 - RNA, 20 nt, Artificial Sequence
  spacer sequence CTCN PAM
accucugcccagccccuccc

SEQ ID NO: 26399 - RNA, 20 nt, Artificial Sequence
  spacer sequence CTCN PAM
ggcuucagaugucagcucca

SEQ ID NO: 26400 - RNA, 20 nt, Artificial Sequence
  spacer sequence CTCN PAM
uggugcaggggcagccuggg

SEQ ID NO: 26401 - RNA, 20 nt, Artificial Sequence
  spacer sequence CTCN PAM
caggcugccccugcaccagg

SEQ ID NO: 26402 - RNA, 20 nt, Artificial Sequence
  spacer sequence CTCN PAM
cccaggcugccccugcacca

SEQ ID NO: 26403 - RNA, 20 nt, Artificial Sequence
  spacer sequence CTCN PAM
agggcucucccaggcugccc

SEQ ID NO: 26404 - RNA, 20 nt, Artificial Sequence
  spacer sequence CTCN PAM
ccgcccuuccagcccuaccu

SEQ ID NO: 26405 - RNA, 20 nt, Artificial Sequence
  spacer sequence CTCN PAM
aggaguugaggggcaggaac

SEQ ID NO: 26406 - RNA, 20 nt, Artificial Sequence
  spacer sequence CTCN PAM
uggagccggcugcagacgug

SEQ ID NO: 26407 - RNA, 20 nt, Artificial Sequence
  spacer sequence CTCN PAM
acuccuggagccggcugcag

SEQ ID NO: 26408 - RNA, 20 nt, Artificial Sequence
  spacer sequence CTCN PAM
gguuccugccccucaacucc

SEQ ID NO: 26409 - RNA, 20 nt, Artificial Sequence
  spacer sequence CTCN PAM
ucuuccugggccagcccacc

SEQ ID NO: 26410 - RNA, 20 nt, Artificial Sequence
  spacer sequence CTCN PAM
cccuuucccucccuggcaua

SEQ ID NO: 26411 - RNA, 20 nt, Artificial Sequence
  spacer sequence CTCN PAM
cuggcauagcguagcccaca

SEQ ID NO: 26412 - RNA, 20 nt, Artificial Sequence
  spacer sequence CTCN PAM
ccuccugggcuagcccaacc

SEQ ID NO: 26413 - RNA, 20 nt, Artificial Sequence
  spacer sequence CTCN PAM
uccugggcuagcccaacccc

SEQ ID NO: 26414 - RNA, 20 nt, Artificial Sequence
  spacer sequence CTCN PAM
ugggcuagcccaacccccca

SEQ ID NO: 26415 - RNA, 20 nt, Artificial Sequence
  spacer sequence CTCN PAM
cuaggccaguccacagcccu

SEQ ID NO: 26416 - RNA, 20 nt, Artificial Sequence
  spacer sequence CTCN PAM
auucuccagacuugaaauug

SEQ ID NO: 26417 - RNA, 20 nt, Artificial Sequence
  spacer sequence CTCN PAM
agacuugaaauuggguaagc

SEQ ID NO: 26418 - RNA, 20 nt, Artificial Sequence
  spacer sequence CTCN PAM
ggcaggcaagggguaaagcc

SEQ ID NO: 26419 - RNA, 20 nt, Artificial Sequence
  spacer sequence CTCN PAM
gcagccucaggcaggcaagg

SEQ ID NO: 26420 - RNA, 20 nt, Artificial Sequence
  spacer sequence CTCN PAM
acacugacaggggcucugca

SEQ ID NO: 26421 - RNA, 20 nt, Artificial Sequence
  spacer sequence CTCN PAM
gggaacauaggcagaguugu

SEQ ID NO: 26422 - RNA, 20 nt, Artificial Sequence
  spacer sequence CTCN PAM
gccuauguucccagaggccu

SEQ ID NO: 26423 - RNA, 20 nt, Artificial Sequence
  spacer sequence CTCN PAM
acgccacacaccacggcagc

SEQ ID NO: 26424 - RNA, 20 nt, Artificial Sequence
  spacer sequence CTCN PAM
cgcacgucccuccucucagu

SEQ ID NO: 26425 - RNA, 20 nt, Artificial Sequence
  spacer sequence CTCN PAM
ucucaguaacccuccucccg

SEQ ID NO: 26426 - RNA, 20 nt, Artificial Sequence
  spacer sequence CTCN PAM
caguaacccuccucccgagg

SEQ ID NO: 26427 - RNA, 20 nt, Artificial Sequence
  spacer sequence CTCN PAM
guaacccuccucccgagggc

SEQ ID NO: 26428 - RNA, 20 nt, Artificial Sequence
  spacer sequence CTCN PAM
ucccgagggcugcgcugucc

SEQ ID NO: 26429 - RNA, 20 nt, Artificial Sequence
  spacer sequence CTCN PAM
cgagggcugcgcugucccua

SEQ ID NO: 26430 - RNA, 20 nt, Artificial Sequence
  spacer sequence CTCN PAM
ggaggaggguuacugagagg

SEQ ID NO: 26431 - RNA, 20 nt, Artificial Sequence
  spacer sequence CTCN PAM
guuuauccaccaguaaccug

SEQ ID NO: 26432 - RNA, 20 nt, Artificial Sequence
  spacer sequence CTCN PAM
gccucgguuuauccaccagu

SEQ ID NO: 26433 - RNA, 20 nt, Artificial Sequence
  spacer sequence CTCN PAM
gcacccucucgagcagaggu

SEQ ID NO: 26434 - RNA, 20 nt, Artificial Sequence
  spacer sequence CTCN PAM
cgagcagagguucccagccu

SEQ ID NO: 26435 - RNA, 20 nt, Artificial Sequence
  spacer sequence CTCN PAM
agcagagguucccagccugg

SEQ ID NO: 26436 - RNA, 20 nt, Artificial Sequence
  spacer sequence CTCN PAM
agagggugcagagggggcag

SEQ ID NO: 26437 - RNA, 20 nt, Artificial Sequence
  spacer sequence CTCN PAM
gcucgagagggugcagaggg

SEQ ID NO: 26438 - RNA, 20 nt, Artificial Sequence
  spacer sequence CTCN PAM
gugggugcaggaucauccag

SEQ ID NO: 26439 - RNA, 20 nt, Artificial Sequence
  spacer sequence CTCN PAM
agacauugcccagggcccuc

SEQ ID NO: 26440 - RNA, 20 nt, Artificial Sequence
  spacer sequence CTCN PAM
cccgcccaggcugugacaac

SEQ ID NO: 26441 - RNA, 20 nt, Artificial Sequence
  spacer sequence CTCN PAM
uggcauggagagggcggagg

SEQ ID NO: 26442 - RNA, 20 nt, Artificial Sequence
  spacer sequence CTCN PAM
augccaggagcacucccccg

SEQ ID NO: 26443 - RNA, 20 nt, Artificial Sequence
  spacer sequence CTCN PAM
ccaugccaggagcacucccc

SEQ ID NO: 26444 - RNA, 20 nt, Artificial Sequence
  spacer sequence CTCN PAM
gcccucuccaugccaggagc

SEQ ID NO: 26445 - RNA, 20 nt, Artificial Sequence
  spacer sequence CTCN PAM
gcucccugcagugcccaggu

SEQ ID NO: 26446 - RNA, 20 nt, Artificial Sequence
  spacer sequence CTCN PAM
cugcagugcccagguggccc

SEQ ID NO: 26447 - RNA, 20 nt, Artificial Sequence
  spacer sequence CTCN PAM
cucucgccccuucccccagg

SEQ ID NO: 26448 - RNA, 20 nt, Artificial Sequence
  spacer sequence CTCN PAM
cgccccuucccccagggaca

SEQ ID NO: 26449 - RNA, 20 nt, Artificial Sequence
  spacer sequence CTCN PAM
ccccuucccccagggacacc

SEQ ID NO: 26450 - RNA, 20 nt, Artificial Sequence
  spacer sequence CTCN PAM
cggcgguggguggaccugga

SEQ ID NO: 26451 - RNA, 20 nt, Artificial Sequence
  spacer sequence CTCN PAM
gaggacuugagccugcuguu

SEQ ID NO: 26452 - RNA, 20 nt, Artificial Sequence
  spacer sequence CTCN PAM
gaguuagaauccagguccac

SEQ ID NO: 26453 - RNA, 20 nt, Artificial Sequence
  spacer sequence CTCN PAM
aguccucugaguuagaaucc

SEQ ID NO: 26454 - RNA, 20 nt, Artificial Sequence
  spacer sequence CTCN PAM
gaugauuguagggacaggcg

SEQ ID NO: 26455 - RNA, 20 nt, Artificial Sequence
  spacer sequence CTCN PAM
cgcccaccccccacccaccc

SEQ ID NO: 26456 - RNA, 20 nt, Artificial Sequence
  spacer sequence CTCN PAM
ugggccgggacccagccucg

SEQ ID NO: 26457 - RNA, 20 nt, Artificial Sequence
  spacer sequence CTCN PAM
cauuuccacggccagcaugg

SEQ ID NO: 26458 - RNA, 20 nt, Artificial Sequence
  spacer sequence CTCN PAM
gcaaccgccucccauuucca

SEQ ID NO: 26459 - RNA, 20 nt, Artificial Sequence
  spacer sequence CTCN PAM
gcaggaagccgugucugcag

SEQ ID NO: 26460 - RNA, 20 nt, Artificial Sequence
  spacer sequence CTCN PAM
gcagacacggcuuccugccg

SEQ ID NO: 26461 - RNA, 20 nt, Artificial Sequence
  spacer sequence CTCN PAM
ucccugccucagguggcccc

SEQ ID NO: 26462 - RNA, 20 nt, Artificial Sequence
  spacer sequence CTCN PAM
uuccccagacgugcguuugu

SEQ ID NO: 26463 - RNA, 20 nt, Artificial Sequence
  spacer sequence CTCN PAM
augaaaccucacucccccca

SEQ ID NO: 26464 - RNA, 20 nt, Artificial Sequence
  spacer sequence CTCN PAM
cuccccccagccauggaguc

SEQ ID NO: 26465 - RNA, 20 nt, Artificial Sequence
  spacer sequence CTCN PAM
ccccagccauggagucccug

SEQ ID NO: 26466 - RNA, 20 nt, Artificial Sequence
  spacer sequence CTCN PAM
auggcuggggggagugaggu

SEQ ID NO: 26467 - RNA, 20 nt, Artificial Sequence
  spacer sequence CTCN PAM
caaccuggcuccacugcccc

SEQ ID NO: 26468 - RNA, 20 nt, Artificial Sequence
  spacer sequence CTCN PAM
acugccccaagccccucucu

SEQ ID NO: 26469 - RNA, 20 nt, Artificial Sequence
  spacer sequence CTCN PAM
cucuggcccaaccuguucuc

SEQ ID NO: 26470 - RNA, 20 nt, Artificial Sequence
  spacer sequence CTCN PAM
cuggcccaaccuguucuccc

SEQ ID NO: 26471 - RNA, 20 nt, Artificial Sequence
  spacer sequence CTCN PAM
ggcccaaccuguucuccccu

SEQ ID NO: 26472 - RNA, 20 nt, Artificial Sequence
  spacer sequence CTCN PAM
ccuaguucaaggcuccccag

SEQ ID NO: 26473 - RNA, 20 nt, Artificial Sequence
  spacer sequence CTCN PAM
ccaggggccugccauuacgu

SEQ ID NO: 26474 - RNA, 20 nt, Artificial Sequence
  spacer sequence CTCN PAM
ugcuguguugcccccagacc

SEQ ID NO: 26475 - RNA, 20 nt, Artificial Sequence
  spacer sequence CTCN PAM
ucugcagggucugggggcaa

SEQ ID NO: 26476 - RNA, 20 nt, Artificial Sequence
  spacer sequence CTCN PAM
ucguguugcugugccugggc

SEQ ID NO: 26477 - RNA, 20 nt, Artificial Sequence
  spacer sequence CTCN PAM
gcucagcucgcugggcgagc

SEQ ID NO: 26478 - RNA, 20 nt, Artificial Sequence
  spacer sequence CTCN PAM
gcucgcugggcgagcacgcc

SEQ ID NO: 26479 - RNA, 20 nt, Artificial Sequence
  spacer sequence CTCN PAM
cugggcgagcacgccuucuu

SEQ ID NO: 26480 - RNA, 20 nt, Artificial Sequence
  spacer sequence CTCN PAM
cccagcgagcugagcagagc

SEQ ID NO: 26481 - RNA, 20 nt, Artificial Sequence
  spacer sequence CTCN PAM
ccuugcggaugcgcggcagc

SEQ ID NO: 26482 - RNA, 20 nt, Artificial Sequence
  spacer sequence CTCN PAM
ccaccuggcuggugugcagc

SEQ ID NO: 26483 - RNA, 20 nt, Artificial Sequence
  spacer sequence CTCN PAM
ucgccaaccgggucugucug

SEQ ID NO: 26484 - RNA, 20 nt, Artificial Sequence
  spacer sequence CTCN PAM
ccaaccgggucugucugggg

SEQ ID NO: 26485 - RNA, 20 nt, Artificial Sequence
  spacer sequence CTCN PAM
acacggagccaccagagggg

SEQ ID NO: 26486 - RNA, 20 nt, Artificial Sequence
  spacer sequence CTCN PAM
guguugagggcgcgguggau

SEQ ID NO: 26487 - RNA, 20 nt, Artificial Sequence
  spacer sequence CTCN PAM
gguggcuccguguugagggc

SEQ ID NO: 26488 - RNA, 20 nt, Artificial Sequence
  spacer sequence CTCN PAM
uucgaccccucugguggcuc

SEQ ID NO: 26489 - RNA, 20 nt, Artificial Sequence
  spacer sequence CTCN PAM
uccuucgaccccucuggugg

SEQ ID NO: 26490 - RNA, 20 nt, Artificial Sequence
  spacer sequence CTCN PAM
gccgucuccuccuucgaccc

SEQ ID NO: 26491 - RNA, 20 nt, Artificial Sequence
  spacer sequence CTCN PAM
gccucugccgucuccuccuu

SEQ ID NO: 26492 - RNA, 20 nt, Artificial Sequence
  spacer sequence CTCN PAM
ccccgaagccggccgcgggg

SEQ ID NO: 26493 - RNA, 20 nt, Artificial Sequence
  spacer sequence CTCN PAM
ugcaccccgcggccggcuuc

SEQ ID NO: 26494 - RNA, 20 nt, Artificial Sequence
  spacer sequence CTCN PAM
gggaaccuccugcaccccgc

SEQ ID NO: 26495 - RNA, 20 nt, Artificial Sequence
  spacer sequence CTCN PAM
cugguugugccugucggcca

SEQ ID NO: 26496 - RNA, 20 nt, Artificial Sequence
  spacer sequence CTCN PAM
gccgucagcggccucugcag

SEQ ID NO: 26497 - RNA, 20 nt, Artificial Sequence
  spacer sequence CTCN PAM
gcagaggcccagggcgcgag

SEQ ID NO: 26498 - RNA, 20 nt, Artificial Sequence
  spacer sequence CTCN PAM
gcagaggccgcugacggcag

SEQ ID NO: 26499 - RNA, 20 nt, Artificial Sequence
  spacer sequence CTCN PAM
cgcccugggccucugcagag

SEQ ID NO: 26500 - RNA, 20 nt, Artificial Sequence
  spacer sequence CTCN PAM
gggccgcuggggacggaacc

SEQ ID NO: 26501 - RNA, 20 nt, Artificial Sequence
  spacer sequence CTCN PAM
accucggggccgcuggggac

SEQ ID NO: 26502 - RNA, 20 nt, Artificial Sequence
  spacer sequence CTCN PAM
ggagggcuggaaacgggcgc

SEQ ID NO: 26503 - RNA, 20 nt, Artificial Sequence
  spacer sequence CTCN PAM
ggagccguuggcugguccug

SEQ ID NO: 26504 - RNA, 20 nt, Artificial Sequence
  spacer sequence CTCN PAM
uuguccacggcccggcgcgc

SEQ ID NO: 26505 - RNA, 20 nt, Artificial Sequence
  spacer sequence CTCN PAM
agcaggaagcgcacgcggcg

SEQ ID NO: 26506 - RNA, 20 nt, Artificial Sequence
  spacer sequence CTCN PAM
gcguccgcuucgggugccac

SEQ ID NO: 26507 - RNA, 20 nt, Artificial Sequence
  spacer sequence CTCN PAM
gccuccgcguccgcuucggg

SEQ ID NO: 26508 - RNA, 20 nt, Artificial Sequence
  spacer sequence CTCN PAM
cggcgcagccuccgccuccg

SEQ ID NO: 26509 - RNA, 20 nt, Artificial Sequence
  spacer sequence CTCN PAM
cgcggcgcagccuccgccuc

SEQ ID NO: 26510 - RNA, 20 nt, Artificial Sequence
  spacer sequence CTCN PAM
uacggccgcccgcccgccgc

SEQ ID NO: 26511 - RNA, 20 nt, Artificial Sequence
  spacer sequence CTCN PAM
ccgggcuggggggcccccgu

SEQ ID NO: 26512 - RNA, 20 nt, Artificial Sequence
  spacer sequence CTCN PAM
ugcagcuccccgggcugggg

SEQ ID NO: 26513 - RNA, 20 nt, Artificial Sequence
  spacer sequence CTCN PAM
agcuccugcagcuccccggg

SEQ ID NO: 26514 - RNA, 20 nt, Artificial Sequence
  spacer sequence CTCN PAM
cgcgcgacuucgaugcggcg

SEQ ID NO: 26515 - RNA, 20 nt, Artificial Sequence
  spacer sequence CTCN PAM
gccaggcccuggugcggcgc

SEQ ID NO: 26516 - RNA, 20 nt, Artificial Sequence
  spacer sequence CTCN PAM
uggcacagcucggggacagc

SEQ ID NO: 26517 - RNA, 20 nt, Artificial Sequence
  spacer sequence CTCN PAM
gggacagcgcacgucaccgg

SEQ ID NO: 26518 - RNA, 20 nt, Artificial Sequence
  spacer sequence CTCN PAM
gcgcuugcuucaggccagag

SEQ ID NO: 26519 - RNA, 20 nt, Artificial Sequence
  spacer sequence CTCN PAM
ggccugaagcaagcgccgag

SEQ ID NO: 26520 - RNA, 20 nt, Artificial Sequence
  spacer sequence CTCN PAM
gcgggggccgcucuggccug

SEQ ID NO: 26521 - RNA, 20 nt, Artificial Sequence
  spacer sequence CTCN PAM
ggccgaccggggagccagga

SEQ ID NO: 26522 - RNA, 20 nt, Artificial Sequence
  spacer sequence CTCN PAM
ccggucggccagaguguggu

SEQ ID NO: 26523 - RNA, 20 nt, Artificial Sequence
  spacer sequence CTCN PAM
uuccuggcuccccggucggc

SEQ ID NO: 26524 - RNA, 20 nt, Artificial Sequence
  spacer sequence CTCN PAM
agacacacacacagcgcagu

SEQ ID NO: 26525 - RNA, 20 nt, Artificial Sequence
  spacer sequence CTCN PAM
cugcgcugugugugugucuu

SEQ ID NO: 26526 - RNA, 20 nt, Artificial Sequence
  spacer sequence CTCN PAM
uuccauucuauuuaauugca

SEQ ID NO: 26527 - RNA, 20 nt, Artificial Sequence
  spacer sequence CTCN PAM
uccgcauuccuccccgagug

SEQ ID NO: 26528 - RNA, 20 nt, Artificial Sequence
  spacer sequence CTCN PAM
gcauuccuccccgagugacu

SEQ ID NO: 26529 - RNA, 20 nt, Artificial Sequence
  spacer sequence CTCN PAM
ccgagugacugguuuggccg

SEQ ID NO: 26530 - RNA, 20 nt, Artificial Sequence
  spacer sequence CTCN PAM
gggaggaaugcggaggagcg

SEQ ID NO: 26531 - RNA, 20 nt, Artificial Sequence
  spacer sequence CTCN PAM
auccccgagugggacuggac

SEQ ID NO: 26532 - RNA, 20 nt, Artificial Sequence
  spacer sequence CTCN PAM
gggauggagugggccggcgg

SEQ ID NO: 26533 - RNA, 20 nt, Artificial Sequence
  spacer sequence CTCN PAM
ggcauagggacguggggugc

SEQ ID NO: 26534 - RNA, 20 nt, Artificial Sequence
  spacer sequence CTCN PAM
gcucucccggggaccccaag

SEQ ID NO: 26535 - RNA, 20 nt, Artificial Sequence
  spacer sequence CTCN PAM
cccggggaccccaagccugg

SEQ ID NO: 26536 - RNA, 20 nt, Artificial Sequence
  spacer sequence CTCN PAM
cggggaccccaagccuggcg

SEQ ID NO: 26537 - RNA, 20 nt, Artificial Sequence
  spacer sequence CTCN PAM
ccgcgugugcgccaggcuug

SEQ ID NO: 26538 - RNA, 20 nt, Artificial Sequence
  spacer sequence CTCN PAM
auggccccgcccuccccgcg

SEQ ID NO: 26539 - RNA, 20 nt, Artificial Sequence
  spacer sequence CTCN PAM
cugcagugccuucuccaugg

SEQ ID NO: 26540 - RNA, 20 nt, Artificial Sequence
  spacer sequence CTCN PAM
gccuggugcucccugcagug

SEQ ID NO: 26541 - RNA, 20 nt, Artificial Sequence
  spacer sequence CTCN PAM
gcccggcucugccuggugcu

SEQ ID NO: 26542 - RNA, 20 nt, Artificial Sequence
  spacer sequence CTCN PAM
cgcccuagugccggccggcc

SEQ ID NO: 26543 - RNA, 20 nt, Artificial Sequence
  spacer sequence CTCN PAM
ccuccacaccuccgccuugc

SEQ ID NO: 26544 - RNA, 20 nt, Artificial Sequence
  spacer sequence CTCN PAM
uccacaccuccgccuugcuc

SEQ ID NO: 26545 - RNA, 20 nt, Artificial Sequence
  spacer sequence CTCN PAM
acaccuccgccuugcucaga

SEQ ID NO: 26546 - RNA, 20 nt, Artificial Sequence
  spacer sequence CTCN PAM
gccuugcucagagaccugca

SEQ ID NO: 26547 - RNA, 20 nt, Artificial Sequence
  spacer sequence CTCN PAM
gagaccugcaccaugggacc

SEQ ID NO: 26548 - RNA, 20 nt, Artificial Sequence
  spacer sequence CTCN PAM
gagcaaggcggaggugugga

SEQ ID NO: 26549 - RNA, 20 nt, Artificial Sequence
  spacer sequence CTCN PAM
auccucaggacgguucacug

SEQ ID NO: 26550 - RNA, 20 nt, Artificial Sequence
  spacer sequence CTCN PAM
ggacgguucacugcagaccu

SEQ ID NO: 26551 - RNA, 20 nt, Artificial Sequence
  spacer sequence CTCN PAM
agaaccuuccgcggaacccc

SEQ ID NO: 26552 - RNA, 20 nt, Artificial Sequence
  spacer sequence CTCN PAM
ccuugcugaccagcucaaac

SEQ ID NO: 26553 - RNA, 20 nt, Artificial Sequence
  spacer sequence CTCN PAM
uugcugaccagcucaaacac

SEQ ID NO: 26554 - RNA, 20 nt, Artificial Sequence
  spacer sequence CTCN PAM
aacaccucacuagcggguac

SEQ ID NO: 26555 - RNA, 20 nt, Artificial Sequence
  spacer sequence CTCN PAM
cuagcggguacaagccucgg

SEQ ID NO: 26556 - RNA, 20 nt, Artificial Sequence
  spacer sequence CTCN PAM
ggcgcgaccucacaccaggg

SEQ ID NO: 26557 - RNA, 20 nt, Artificial Sequence
  spacer sequence CTCN PAM
caccagggggaggaaagccg

SEQ ID NO: 26558 - RNA, 20 nt, Artificial Sequence
  spacer sequence CTCN PAM
cccuggugugaggucgcgcc

SEQ ID NO: 26559 - RNA, 20 nt, Artificial Sequence
  spacer sequence CTCN PAM
gggacugcccagccuguguc

SEQ ID NO: 26560 - RNA, 20 nt, Artificial Sequence
  spacer sequence CTCN PAM
uuccucugggacugcccagc

SEQ ID NO: 26561 - RNA, 20 nt, Artificial Sequence
  spacer sequence CTCN PAM
cccacccccacgggcucggg

SEQ ID NO: 26562 - RNA, 20 nt, Artificial Sequence
  spacer sequence CTCN PAM
ggaaggucaggcccagccag

SEQ ID NO: 26563 - RNA, 20 nt, Artificial Sequence
  spacer sequence CTCN PAM
gaccccugcuggcugggccu

SEQ ID NO: 26564 - RNA, 20 nt, Artificial Sequence
  spacer sequence CTCN PAM
gcugugcggcucaggacccc

SEQ ID NO: 26565 - RNA, 20 nt, Artificial Sequence
  spacer sequence CTCN PAM
ggaccccaccuccgagggcg

SEQ ID NO: 26566 - RNA, 20 nt, Artificial Sequence
  spacer sequence CTCN PAM
gagggcgccuccguuggggc

SEQ ID NO: 26567 - RNA, 20 nt, Artificial Sequence
  spacer sequence CTCN PAM
gaggugggguccugagccgc

SEQ ID NO: 26568 - RNA, 20 nt, Artificial Sequence
  spacer sequence CTCN PAM
guuggggccauggaggccgg

SEQ ID NO: 26569 - RNA, 20 nt, Artificial Sequence
  spacer sequence CTCN PAM
auggccccaacggaggcgcc

SEQ ID NO: 26570 - RNA, 20 nt, Artificial Sequence
  spacer sequence CTCN PAM
ccugggggcugcgguaggcg

SEQ ID NO: 26571 - RNA, 20 nt, Artificial Sequence
  spacer sequence CTCN PAM
gcagcuucugacacaacucc

SEQ ID NO: 26572 - RNA, 20 nt, Artificial Sequence
  spacer sequence CTCN PAM
gggggacacuguccuggggg

SEQ ID NO: 26573 - RNA, 20 nt, Artificial Sequence
  spacer sequence CTCN PAM
cccacgccccccaggacagu

SEQ ID NO: 26574 - RNA, 20 nt, Artificial Sequence
  spacer sequence CTCN PAM
aggagggaggcgcucaggcc

SEQ ID NO: 26575 - RNA, 20 nt, Artificial Sequence
  spacer sequence CTCN PAM
uggagcggcguccagccagc

SEQ ID NO: 26576 - RNA, 20 nt, Artificial Sequence
  spacer sequence CTCN PAM
cuccuggagcggcguccagc

SEQ ID NO: 26577 - RNA, 20 nt, Artificial Sequence
  spacer sequence CTCN PAM
ggccggacaggaaggaggcg

SEQ ID NO: 26578 - RNA, 20 nt, Artificial Sequence
  spacer sequence CTCN PAM
uuccuguccggccugagcgc

SEQ ID NO: 26579 - RNA, 20 nt, Artificial Sequence
  spacer sequence CTCN PAM
gccauccaacccaggucacc

SEQ ID NO: 26580 - RNA, 20 nt, Artificial Sequence
  spacer sequence CTCN PAM
guggcagcagcugccggugg

SEQ ID NO: 26581 - RNA, 20 nt, Artificial Sequence
  spacer sequence CTCN PAM
cugguggccgcggcagccuc

SEQ ID NO: 26582 - RNA, 20 nt, Artificial Sequence
  spacer sequence CTCN PAM
cgcuggccccaggcgagacg

SEQ ID NO: 26583 - RNA, 20 nt, Artificial Sequence
  spacer sequence CTCN PAM
ccuggggccagcgggagucc

SEQ ID NO: 26584 - RNA, 20 nt, Artificial Sequence
  spacer sequence CTCN PAM
aacugcugauuucaggugau

SEQ ID NO: 26585 - RNA, 20 nt, Artificial Sequence
  spacer sequence CTCN PAM
acuaaaaagacaaaaaaauu

SEQ ID NO: 26586 - RNA, 20 nt, Artificial Sequence
  spacer sequence CTCN PAM
gcaggcugaggcagaagaau

SEQ ID NO: 26587 - RNA, 20 nt, Artificial Sequence
  spacer sequence CTCN PAM
gccugcggaguagcuaggau

SEQ ID NO: 26588 - RNA, 20 nt, Artificial Sequence
  spacer sequence CTCN PAM
uggguucaagcaauucuucu

SEQ ID NO: 26589 - RNA, 20 nt, Artificial Sequence
  spacer sequence CTCN PAM
accuccuggguucaagcaau

SEQ ID NO: 26590 - RNA, 20 nt, Artificial Sequence
  spacer sequence CTCN PAM
cugcaaacuccaccuccugg

SEQ ID NO: 26591 - RNA, 20 nt, Artificial Sequence
  spacer sequence CTCN PAM
gcucacugcaaacuccaccu

SEQ ID NO: 26592 - RNA, 20 nt, Artificial Sequence
  spacer sequence CTCN PAM
agccugggugacagagcaag

SEQ ID NO: 26593 - RNA, 20 nt, Artificial Sequence
  spacer sequence CTCN PAM
gucacccaggcuggagugca

SEQ ID NO: 26594 - RNA, 20 nt, Artificial Sequence
  spacer sequence CTCN PAM
aucucaaaaaaaaaaaaaaa

SEQ ID NO: 26595 - RNA, 20 nt, Artificial Sequence
  spacer sequence CTCN PAM
aaaaaaaaaaaaaaaaaauu

SEQ ID NO: 26596 - RNA, 20 nt, Artificial Sequence
  spacer sequence CTCN PAM
ggguggugaauuuuuuuuuu

SEQ ID NO: 26597 - RNA, 20 nt, Artificial Sequence
  spacer sequence CTCN PAM
caguccaaagcccucugcug

SEQ ID NO: 26598 - RNA, 20 nt, Artificial Sequence
  spacer sequence CTCN PAM
gcugagagaggagggauugg

SEQ ID NO: 26599 - RNA, 20 nt, Artificial Sequence
  spacer sequence CTCN PAM
gcagagggcuuuggacugug

SEQ ID NO: 26600 - RNA, 20 nt, Artificial Sequence
  spacer sequence CTCN PAM
cagcagagggcuuuggacug

SEQ ID NO: 26601 - RNA, 20 nt, Artificial Sequence
  spacer sequence CTCN PAM
cucagcagagggcuuuggac

SEQ ID NO: 26602 - RNA, 20 nt, Artificial Sequence
  spacer sequence CTCN PAM
ucucucagcagagggcuuug

SEQ ID NO: 26603 - RNA, 20 nt, Artificial Sequence
  spacer sequence CTCN PAM
guaaccccaaucccuccucu

SEQ ID NO: 26604 - RNA, 20 nt, Artificial Sequence
  spacer sequence CTCN PAM
caagagucuccacccuacac

SEQ ID NO: 26605 - RNA, 20 nt, Artificial Sequence
  spacer sequence CTCN PAM
ugggagguucucaguaaccc

SEQ ID NO: 26606 - RNA, 20 nt, Artificial Sequence
  spacer sequence CTCN PAM
acccuacacagaagacgggg

SEQ ID NO: 26607 - RNA, 20 nt, Artificial Sequence
  spacer sequence CTCN PAM
agcucuggcccagccccauc

SEQ ID NO: 26608 - RNA, 20 nt, Artificial Sequence
  spacer sequence CTCN PAM
ggcccagccccaucugacca

SEQ ID NO: 26609 - RNA, 20 nt, Artificial Sequence
  spacer sequence CTCN PAM
cagguggucagauggggcug

SEQ ID NO: 26610 - RNA, 20 nt, Artificial Sequence
  spacer sequence CTCN PAM
aggccaauaccacucacagg

SEQ ID NO: 26611 - RNA, 20 nt, Artificial Sequence
  spacer sequence CTCN PAM
aucuccaggccaauaccacu

SEQ ID NO: 26612 - RNA, 20 nt, Artificial Sequence
  spacer sequence CTCN PAM
caaggaggcugagcuccguc

SEQ ID NO: 26613 - RNA, 20 nt, Artificial Sequence
  spacer sequence CTCN PAM
uugggaggugcaucccuguc

SEQ ID NO: 26614 - RNA, 20 nt, Artificial Sequence
  spacer sequence CTCN PAM
gccuccuugggaggugcauc

SEQ ID NO: 26615 - RNA, 20 nt, Artificial Sequence
  spacer sequence CTCN PAM
gucgggggaaccuggccugg

SEQ ID NO: 26616 - RNA, 20 nt, Artificial Sequence
  spacer sequence CTCN PAM
acaagccuaaggacacagug

SEQ ID NO: 26617 - RNA, 20 nt, Artificial Sequence
  spacer sequence CTCN PAM
auccuguucccaggcuacuc

SEQ ID NO: 26618 - RNA, 20 nt, Artificial Sequence
  spacer sequence CTCN PAM
auggaaggaaaacccacguc

SEQ ID NO: 26619 - RNA, 20 nt, Artificial Sequence
  spacer sequence CTCN PAM
guccacaguuucaggccccg

SEQ ID NO: 26620 - RNA, 20 nt, Artificial Sequence
  spacer sequence CTCN PAM
gggguccacagacggggccu

SEQ ID NO: 26621 - RNA, 20 nt, Artificial Sequence
  spacer sequence CTCN PAM
ggugccuacugaggcgacca

SEQ ID NO: 26622 - RNA, 20 nt, Artificial Sequence
  spacer sequence CTCN PAM
guaggcaccugagcagggcu

SEQ ID NO: 26623 - RNA, 20 nt, Artificial Sequence
  spacer sequence CTCN PAM
ggggggcugcagggaggaag

SEQ ID NO: 26624 - RNA, 20 nt, Artificial Sequence
  spacer sequence CTCN PAM
cugcagccccccagaguggc

SEQ ID NO: 26625 - RNA, 20 nt, Artificial Sequence
  spacer sequence CTCN PAM
gcccaucauccuucccaccu

SEQ ID NO: 26626 - RNA, 20 nt, Artificial Sequence
  spacer sequence CTCN PAM
ggccuggggaggcacggauc

SEQ ID NO: 26627 - RNA, 20 nt, Artificial Sequence
  spacer sequence CTCN PAM
ccaggccagagcucagccca

SEQ ID NO: 26628 - RNA, 20 nt, Artificial Sequence
  spacer sequence CTCN PAM
agauccgugccuccccaggc

SEQ ID NO: 26629 - RNA, 20 nt, Artificial Sequence
  spacer sequence CTCN PAM
acuugccgagcccaaaaaag

SEQ ID NO: 26630 - RNA, 20 nt, Artificial Sequence
  spacer sequence CTCN PAM
gcaaguggagcuggaccuug

SEQ ID NO: 26631 - RNA, 20 nt, Artificial Sequence
  spacer sequence CTCN PAM
ugaccaaccugugucaggcu

SEQ ID NO: 26632 - RNA, 20 nt, Artificial Sequence
  spacer sequence CTCN PAM
uugcaggcuagauccaaaaa

SEQ ID NO: 26633 - RNA, 20 nt, Artificial Sequence
  spacer sequence CTCN PAM
cggcgcaacuucagcagccc

SEQ ID NO: 26634 - RNA, 20 nt, Artificial Sequence
  spacer sequence CTCN PAM
gaaaacaagcuggccggggu

SEQ ID NO: 26635 - RNA, 20 nt, Artificial Sequence
  spacer sequence CTCN PAM
guagcagcugcagccccuca

SEQ ID NO: 26636 - RNA, 20 nt, Artificial Sequence
  spacer sequence CTCN PAM
ugucacccaagcaagacucc

SEQ ID NO: 26637 - RNA, 20 nt, Artificial Sequence
  spacer sequence CTCN PAM
uucucagagggagucaggcc

SEQ ID NO: 26638 - RNA, 20 nt, Artificial Sequence
  spacer sequence CTCN PAM
gagggagucaggccgaugcc

SEQ ID NO: 26639 - RNA, 20 nt, Artificial Sequence
  spacer sequence CTCN PAM
gagaaggagucuugcuuggg

SEQ ID NO: 26640 - RNA, 20 nt, Artificial Sequence
  spacer sequence CTCN PAM
cucugagaaggagucuugcu

SEQ ID NO: 26641 - RNA, 20 nt, Artificial Sequence
  spacer sequence CTCN PAM
gccgugcaggacaggcaucg

SEQ ID NO: 26642 - RNA, 20 nt, Artificial Sequence
  spacer sequence CTCN PAM
gccaucugaggagggcggga

SEQ ID NO: 26643 - RNA, 20 nt, Artificial Sequence
  spacer sequence CTCN PAM
gauggcagaggucucagccg

SEQ ID NO: 26644 - RNA, 20 nt, Artificial Sequence
  spacer sequence CTCN PAM
ucagauggcagaggucucag

SEQ ID NO: 26645 - RNA, 20 nt, Artificial Sequence
  spacer sequence CTCN PAM
cgcccuccucagauggcaga

SEQ ID NO: 26646 - RNA, 20 nt, Artificial Sequence
  spacer sequence CTCN PAM
gucccccucccgcccuccuc

SEQ ID NO: 26647 - RNA, 20 nt, Artificial Sequence
  spacer sequence CTCN PAM
gcgucuugggcucugucccc

SEQ ID NO: 26648 - RNA, 20 nt, Artificial Sequence
  spacer sequence CTCN PAM
uaggggaggcacgggcgaca

SEQ ID NO: 26649 - RNA, 20 nt, Artificial Sequence
  spacer sequence CTCN PAM
ccuaugaggcaccggccucc

SEQ ID NO: 26650 - RNA, 20 nt, Artificial Sequence
  spacer sequence CTCN PAM
gguugugggucugucgcccg

SEQ ID NO: 26651 - RNA, 20 nt, Artificial Sequence
  spacer sequence CTCN PAM
ugaagcaggaagggaguggg

SEQ ID NO: 26652 - RNA, 20 nt, Artificial Sequence
  spacer sequence CTCN PAM
cuuccugcuucaggagcuca

SEQ ID NO: 26653 - RNA, 20 nt, Artificial Sequence
  spacer sequence CTCN PAM
gcuggguccccacucccuuc

SEQ ID NO: 26654 - RNA, 20 nt, Artificial Sequence
  spacer sequence CTCN PAM
uccuccgcuggguccccacu

SEQ ID NO: 26655 - RNA, 20 nt, Artificial Sequence
  spacer sequence CTCN PAM
cuaggguuagcggcaaaguc

SEQ ID NO: 26656 - RNA, 20 nt, Artificial Sequence
  spacer sequence CTCN PAM
gcuaagucacauuccccuga

SEQ ID NO: 26657 - RNA, 20 nt, Artificial Sequence
  spacer sequence CTCN PAM
ggggaaugugacuuagcuga

SEQ ID NO: 26658 - RNA, 20 nt, Artificial Sequence
  spacer sequence CTCN PAM
ggagcggggaacgcagcuga

SEQ ID NO: 26659 - RNA, 20 nt, Artificial Sequence
  spacer sequence CTCN PAM
ugagccucaggggaauguga

SEQ ID NO: 26660 - RNA, 20 nt, Artificial Sequence
  spacer sequence CTCN PAM
uuguagccuuucagcugcgu

SEQ ID NO: 26661 - RNA, 20 nt, Artificial Sequence
  spacer sequence CTCN PAM
cuccuuguagccuuucagcu

SEQ ID NO: 26662 - RNA, 20 nt, Artificial Sequence
  spacer sequence CTCN PAM
cccuccuuguagccuuucag

SEQ ID NO: 26663 - RNA, 20 nt, Artificial Sequence
  spacer sequence CTCN PAM
cucccuccuuguagccuuuc

SEQ ID NO: 26664 - RNA, 20 nt, Artificial Sequence
  spacer sequence CTCN PAM
ccucucucccuccuuguagc

SEQ ID NO: 26665 - RNA, 20 nt, Artificial Sequence
  spacer sequence CTCN PAM
ccacuccccucucucccucc

SEQ ID NO: 26666 - RNA, 20 nt, Artificial Sequence
  spacer sequence CTCN PAM
gaccaaccccuguccuggaa

SEQ ID NO: 26667 - RNA, 20 nt, Artificial Sequence
  spacer sequence CTCN PAM
cucggaccaaccccuguccu

SEQ ID NO: 26668 - RNA, 20 nt, Artificial Sequence
  spacer sequence CTCN PAM
caaugugcuggcccagaacc

SEQ ID NO: 26669 - RNA, 20 nt, Artificial Sequence
  spacer sequence CTCN PAM
ccucccaaugugcuggccca

SEQ ID NO: 26670 - RNA, 20 nt, Artificial Sequence
  spacer sequence CTCN PAM
ccccucccaaugugcuggcc

SEQ ID NO: 26671 - RNA, 20 nt, Artificial Sequence
  spacer sequence CTCN PAM
cuccccucccaaugugcugg

SEQ ID NO: 26672 - RNA, 20 nt, Artificial Sequence
  spacer sequence CTCN PAM
gaacugagggucucaggcgg

SEQ ID NO: 26673 - RNA, 20 nt, Artificial Sequence
  spacer sequence CTCN PAM
guuccgaggccucucucccc

SEQ ID NO: 26674 - RNA, 20 nt, Artificial Sequence
  spacer sequence CTCN PAM
ggcggcacagucagggguca

SEQ ID NO: 26675 - RNA, 20 nt, Artificial Sequence
  spacer sequence CTCN PAM
cgcccuuugaccccugacug

SEQ ID NO: 26676 - RNA, 20 nt, Artificial Sequence
  spacer sequence CTCN PAM
caggccaggaccggacucca

SEQ ID NO: 26677 - RNA, 20 nt, Artificial Sequence
  spacer sequence CTCN PAM
aagccuggguagguggggac

SEQ ID NO: 26678 - RNA, 20 nt, Artificial Sequence
  spacer sequence CTCN PAM
agggcccauccuguccccgg

SEQ ID NO: 26679 - RNA, 20 nt, Artificial Sequence
  spacer sequence CTCN PAM
cuccagggcccauccugucc

SEQ ID NO: 26680 - RNA, 20 nt, Artificial Sequence
  spacer sequence CTCN PAM
cugucagcucccuccagggc

SEQ ID NO: 26681 - RNA, 20 nt, Artificial Sequence
  spacer sequence CTCN PAM
ggaaaccucacugucagcuc

SEQ ID NO: 26682 - RNA, 20 nt, Artificial Sequence
  spacer sequence CTCN PAM
acucuggaaaccucacuguc

SEQ ID NO: 26683 - RNA, 20 nt, Artificial Sequence
  spacer sequence CTCN PAM
ugaccccaucccgcccgggg

SEQ ID NO: 26684 - RNA, 20 nt, Artificial Sequence
  spacer sequence CTCN PAM
gacccugggauuggccaggg

SEQ ID NO: 26685 - RNA, 20 nt, Artificial Sequence
  spacer sequence CTCN PAM
cgaccucugacccugggauu

SEQ ID NO: 26686 - RNA, 20 nt, Artificial Sequence
  spacer sequence CTCN PAM
cucgcgaccucugacccugg

SEQ ID NO: 26687 - RNA, 20 nt, Artificial Sequence
  spacer sequence CTCN PAM
cccucgcgaccucugacccu

SEQ ID NO: 26688 - RNA, 20 nt, Artificial Sequence
  spacer sequence CTCN PAM
gggugcaggguggcgcucgc

SEQ ID NO: 26689 - RNA, 20 nt, Artificial Sequence
  spacer sequence CTCN PAM
cuguccccagcggggccagg

SEQ ID NO: 26690 - RNA, 20 nt, Artificial Sequence
  spacer sequence CTCN PAM
gaccgcgaccccuggccccg

SEQ ID NO: 26691 - RNA, 20 nt, Artificial Sequence
  spacer sequence CTCN PAM
aggugaccgcggccccgacc

SEQ ID NO: 26692 - RNA, 20 nt, Artificial Sequence
  spacer sequence CTCN PAM
aagagacggcggaaggcggg

SEQ ID NO: 26693 - RNA, 20 nt, Artificial Sequence
  spacer sequence CTCN PAM
ucgaguucuucgugcugcuc

SEQ ID NO: 26694 - RNA, 20 nt, Artificial Sequence
  spacer sequence CTCN PAM
ucccgcccgccuuccgccgu

SEQ ID NO: 26695 - RNA, 20 nt, Artificial Sequence
  spacer sequence CTCN PAM
uccacgcgcuguucuucaag

SEQ ID NO: 26696 - RNA, 20 nt, Artificial Sequence
  spacer sequence CTCN PAM
ucaacgugcgcgaccggcuc

SEQ ID NO: 26697 - RNA, 20 nt, Artificial Sequence
  spacer sequence CTCN PAM
accccaacccccucaucaac

SEQ ID NO: 26698 - RNA, 20 nt, Artificial Sequence
  spacer sequence CTCN PAM
cacccccaaucucaacccca

SEQ ID NO: 26699 - RNA, 20 nt, Artificial Sequence
  spacer sequence CTCN PAM
ggggcccgggcccaacggcg

SEQ ID NO: 26700 - RNA, 20 nt, Artificial Sequence
  spacer sequence CTCN PAM
acgugcuccgacaugccucc

SEQ ID NO: 26701 - RNA, 20 nt, Artificial Sequence
  spacer sequence CTCN PAM
gacaugccucccagcgucgc

SEQ ID NO: 26702 - RNA, 20 nt, Artificial Sequence
  spacer sequence CTCN PAM
cagcgucgcgcccuaacgac

SEQ ID NO: 26703 - RNA, 20 nt, Artificial Sequence
  spacer sequence CTCN PAM
gacacuugcgggucguuagg

SEQ ID NO: 26704 - RNA, 20 nt, Artificial Sequence
  spacer sequence CTCN PAM
cggccgccaucggccgcccu

SEQ ID NO: 26705 - RNA, 20 nt, Artificial Sequence
  spacer sequence CTCN PAM
cagccgccgcucuccucacg

SEQ ID NO: 26706 - RNA, 20 nt, Artificial Sequence
  spacer sequence CTCN PAM
ccucacggccucccggccgc

SEQ ID NO: 26707 - RNA, 20 nt, Artificial Sequence
  spacer sequence CTCN PAM
ucacggccucccggccgccg

SEQ ID NO: 26708 - RNA, 20 nt, Artificial Sequence
  spacer sequence CTCN PAM
cggccucccggccgccgccg

SEQ ID NO: 26709 - RNA, 20 nt, Artificial Sequence
  spacer sequence CTCN PAM
cggccgccgccgccaucuuc

SEQ ID NO: 26710 - RNA, 20 nt, Artificial Sequence
  spacer sequence CTCN PAM
uccggcugcggcgcugcuga

SEQ ID NO: 26711 - RNA, 20 nt, Artificial Sequence
  spacer sequence CTCN PAM
cuagcgucagcagcgccgca

SEQ ID NO: 26712 - RNA, 20 nt, Artificial Sequence
  spacer sequence CTCN PAM
ugcccggcguggcgacucgc

SEQ ID NO: 26713 - RNA, 20 nt, Artificial Sequence
  spacer sequence CTCN PAM
gcgggcgcaggggggccgcu

SEQ ID NO: 26714 - RNA, 20 nt, Artificial Sequence
  spacer sequence CTCN PAM
gcgggcgccgcuggcauccc

SEQ ID NO: 26715 - RNA, 20 nt, Artificial Sequence
  spacer sequence CTCN PAM
cccccuaccucggccgcucc

SEQ ID NO: 26716 - RNA, 20 nt, Artificial Sequence
  spacer sequence CTCN PAM
gccgcuccagggggcgggcc

SEQ ID NO: 26717 - RNA, 20 nt, Artificial Sequence
  spacer sequence CTCN PAM
agggggcgggccugcaucug

SEQ ID NO: 26718 - RNA, 20 nt, Artificial Sequence
  spacer sequence CTCN PAM
uuugcauauuggcacccaca

SEQ ID NO: 26719 - RNA, 20 nt, Artificial Sequence
  spacer sequence CTCN PAM
uagccgcgguggauuguggg

SEQ ID NO: 26720 - RNA, 20 nt, Artificial Sequence
  spacer sequence CTCN PAM
aggguuacugucacaccuau

SEQ ID NO: 26721 - RNA, 20 nt, Artificial Sequence
  spacer sequence CTCN PAM
cuucggcagcacauauacua

SEQ ID NO: 26722 - RNA, 20 nt, Artificial Sequence
  spacer sequence CTCN PAM
guaucguuccaauuuuagua

SEQ ID NO: 26723 - RNA, 20 nt, Artificial Sequence
  spacer sequence CTCN PAM
ucaccucguuuggcuucucu

SEQ ID NO: 26724 - RNA, 20 nt, Artificial Sequence
  spacer sequence CTCN PAM
uuuggcuucucuugcccgga

SEQ ID NO: 26725 - RNA, 20 nt, Artificial Sequence
  spacer sequence CTCN PAM
ugcccggauccugccaugac

SEQ ID NO: 26726 - RNA, 20 nt, Artificial Sequence
  spacer sequence CTCN PAM
uguggcgccacuaagguugg

SEQ ID NO: 26727 - RNA, 20 nt, Artificial Sequence
  spacer sequence CTCN PAM
acuccugcguggcgcugugc

SEQ ID NO: 26728 - RNA, 20 nt, Artificial Sequence
  spacer sequence CTCN PAM
ugcguggcgcugugccaccu

SEQ ID NO: 26729 - RNA, 20 nt, Artificial Sequence
  spacer sequence CTCN PAM
ucaggggcacuuacugagug

SEQ ID NO: 26730 - RNA, 20 nt, Artificial Sequence
  spacer sequence CTCN PAM
guaagugccccugaagagca

SEQ ID NO: 26731 - RNA, 20 nt, Artificial Sequence
  spacer sequence CTCN PAM
uguguacgcagccggcacuc

SEQ ID NO: 26732 - RNA, 20 nt, Artificial Sequence
  spacer sequence CTCN PAM
aacaaacaaccaaaaaaccc

SEQ ID NO: 26733 - RNA, 20 nt, Artificial Sequence
  spacer sequence CTCN PAM
cucugucgcccaggcuggag

SEQ ID NO: 26734 - RNA, 20 nt, Artificial Sequence
  spacer sequence CTCN PAM
gucgcccaggcuggagcgca

SEQ ID NO: 26735 - RNA, 20 nt, Artificial Sequence
  spacer sequence CTCN PAM
agccugggcgacagagcgag

SEQ ID NO: 26736 - RNA, 20 nt, Artificial Sequence
  spacer sequence CTCN PAM
gcucucugcaacccccgccu

SEQ ID NO: 26737 - RNA, 20 nt, Artificial Sequence
  spacer sequence CTCN PAM
cugcaacccccgccucccgg

SEQ ID NO: 26738 - RNA, 20 nt, Artificial Sequence
  spacer sequence CTCN PAM
gcaacccccgccucccgggu

SEQ ID NO: 26739 - RNA, 20 nt, Artificial Sequence
  spacer sequence CTCN PAM
cggguucaagccauucuccu

SEQ ID NO: 26740 - RNA, 20 nt, Artificial Sequence
  spacer sequence CTCN PAM
ugccucagccucccaaguag

SEQ ID NO: 26741 - RNA, 20 nt, Artificial Sequence
  spacer sequence CTCN PAM
gccucccaaguagcugggau

SEQ ID NO: 26742 - RNA, 20 nt, Artificial Sequence
  spacer sequence CTCN PAM
caaguagcugggauuacagg

SEQ ID NO: 26743 - RNA, 20 nt, Artificial Sequence
  spacer sequence CTCN PAM
aggcuaauuuuauauuuuua

SEQ ID NO: 26744 - RNA, 20 nt, Artificial Sequence
  spacer sequence CTCN PAM
acuaaaaauauaaaauuagc

SEQ ID NO: 26745 - RNA, 20 nt, Artificial Sequence
  spacer sequence CTCN PAM
auguuggucaggcuggucuc

SEQ ID NO: 26746 - RNA, 20 nt, Artificial Sequence
  spacer sequence CTCN PAM
aacuccuaacuuuaggugau

SEQ ID NO: 26747 - RNA, 20 nt, Artificial Sequence
  spacer sequence CTCN PAM
uaacuuuaggugauuugccc

SEQ ID NO: 26748 - RNA, 20 nt, Artificial Sequence
  spacer sequence CTCN PAM
caaagugcugggauuacagg

SEQ ID NO: 26749 - RNA, 20 nt, Artificial Sequence
  spacer sequence CTCN PAM
aaaaaaaaaaacaacacaaa

SEQ ID NO: 26750 - RNA, 20 nt, Artificial Sequence
  spacer sequence CTCN PAM
cucugucgcccaggcuggag

SEQ ID NO: 26751 - RNA, 20 nt, Artificial Sequence
  spacer sequence CTCN PAM
gucgcccaggcuggagugca

SEQ ID NO: 26752 - RNA, 20 nt, Artificial Sequence
  spacer sequence CTCN PAM
agccugggcgacagagugag

SEQ ID NO: 26753 - RNA, 20 nt, Artificial Sequence
  spacer sequence CTCN PAM
gcucacugcaaccuccgccu

SEQ ID NO: 26754 - RNA, 20 nt, Artificial Sequence
  spacer sequence CTCN PAM
cugcaaccuccgccucuugg

SEQ ID NO: 26755 - RNA, 20 nt, Artificial Sequence
  spacer sequence CTCN PAM
gccucuuggguucaagcaau

SEQ ID NO: 26756 - RNA, 20 nt, Artificial Sequence
  spacer sequence CTCN PAM
uggguucaagcaauucucug

SEQ ID NO: 26757 - RNA, 20 nt, Artificial Sequence
  spacer sequence CTCN PAM
gccucagccuccugaauagc

SEQ ID NO: 26758 - RNA, 20 nt, Artificial Sequence
  spacer sequence CTCN PAM
gccuccugaauagcugggau

SEQ ID NO: 26759 - RNA, 20 nt, Artificial Sequence
  spacer sequence CTCN PAM
ugaauagcugggauugcagg

SEQ ID NO: 26760 - RNA, 20 nt, Artificial Sequence
  spacer sequence CTCN PAM
acuaaaaauacaaaaaaaau

SEQ ID NO: 26761 - RNA, 20 nt, Artificial Sequence
  spacer sequence CTCN PAM
ugaccucgugauccacccgc

SEQ ID NO: 26762 - RNA, 20 nt, Artificial Sequence
  spacer sequence CTCN PAM
ugauccacccgcgucagccu

SEQ ID NO: 26763 - RNA, 20 nt, Artificial Sequence
  spacer sequence CTCN PAM
caaagugcuggaguuacagg

SEQ ID NO: 26764 - RNA, 20 nt, Artificial Sequence
  spacer sequence CTCN PAM
agcacuuugggaggcugacg

SEQ ID NO: 26765 - RNA, 20 nt, Artificial Sequence
  spacer sequence CTCN PAM
ugccuguaacuccagcacuu

SEQ ID NO: 26766 - RNA, 20 nt, Artificial Sequence
  spacer sequence CTCN PAM
guuaacuuuuaaaaacauuu

SEQ ID NO: 26767 - RNA, 20 nt, Artificial Sequence
  spacer sequence CTCN PAM
caaguagcuggaauuacagg

SEQ ID NO: 26768 - RNA, 20 nt, Artificial Sequence
  spacer sequence CTCN PAM
gccucccaaguagcuggaau

SEQ ID NO: 26769 - RNA, 20 nt, Artificial Sequence
  spacer sequence CTCN PAM
caccucagccucccaaguag

SEQ ID NO: 26770 - RNA, 20 nt, Artificial Sequence
  spacer sequence CTCN PAM
agcaguccucccaccucagc

SEQ ID NO: 26771 - RNA, 20 nt, Artificial Sequence
  spacer sequence CTCN PAM
ugggcucaagcaguccuccc

SEQ ID NO: 26772 - RNA, 20 nt, Artificial Sequence
  spacer sequence CTCN PAM
aacuccugggcucaagcagu

SEQ ID NO: 26773 - RNA, 20 nt, Artificial Sequence
  spacer sequence CTCN PAM
cugcagccuccaacuccugg

SEQ ID NO: 26774 - RNA, 20 nt, Artificial Sequence
  spacer sequence CTCN PAM
agguuggaugacuaagugag

SEQ ID NO: 26775 - RNA, 20 nt, Artificial Sequence
  spacer sequence CTCN PAM
cuuagucauccaaccuggag

SEQ ID NO: 26776 - RNA, 20 nt, Artificial Sequence
  spacer sequence CTCN PAM
aaaaaauaaaguguaaaaaa

SEQ ID NO: 26777 - RNA, 20 nt, Artificial Sequence
  spacer sequence CTCN PAM
acccaaaaaagcuaaaaaua

SEQ ID NO: 26778 - RNA, 20 nt, Artificial Sequence
  spacer sequence CTCN PAM
acucugcuguuguacagaaa

SEQ ID NO: 26779 - RNA, 20 nt, Artificial Sequence
  spacer sequence CTCN PAM
gcuguuguacagaaaacgca

SEQ ID NO: 26780 - RNA, 20 nt, Artificial Sequence
  spacer sequence CTCN PAM
uacauuuuuaagugguugaa

SEQ ID NO: 26781 - RNA, 20 nt, Artificial Sequence
  spacer sequence CTCN PAM
caagccauacaaaaauaggc

SEQ ID NO: 26782 - RNA, 20 nt, Artificial Sequence
  spacer sequence CTCN PAM
uggaaagcuguguucuugac

SEQ ID NO: 26783 - RNA, 20 nt, Artificial Sequence
  spacer sequence CTCN PAM
uuuuuaguuguuuuacugug

SEQ ID NO: 26784 - RNA, 20 nt, Artificial Sequence
  spacer sequence CTCN PAM
aguuauccaaacaaggucag

SEQ ID NO: 26785 - RNA, 20 nt, Artificial Sequence
  spacer sequence CTCN PAM
ugccuguaaucucagcacuu

SEQ ID NO: 26786 - RNA, 20 nt, Artificial Sequence
  spacer sequence CTCN PAM
gcacuuuuggaggcugaggc

SEQ ID NO: 26787 - RNA, 20 nt, Artificial Sequence
  spacer sequence CTCN PAM
aaaagugcugagauuacagg

SEQ ID NO: 26788 - RNA, 20 nt, Artificial Sequence
  spacer sequence CTCN PAM
gccuccaaaagugcugagau

SEQ ID NO: 26789 - RNA, 20 nt, Artificial Sequence
  spacer sequence CTCN PAM
cgccucagccuccaaaagug

SEQ ID NO: 26790 - RNA, 20 nt, Artificial Sequence
  spacer sequence CTCN PAM
uuauauugcccaggcugguc

SEQ ID NO: 26791 - RNA, 20 nt, Artificial Sequence
  spacer sequence CTCN PAM
acgaaaaauaccaaaaauua

SEQ ID NO: 26792 - RNA, 20 nt, Artificial Sequence
  spacer sequence CTCN PAM
caaguagcugggaccacagg

SEQ ID NO: 26793 - RNA, 20 nt, Artificial Sequence
  spacer sequence CTCN PAM
gccucccaaguagcugggac

SEQ ID NO: 26794 - RNA, 20 nt, Artificial Sequence
  spacer sequence CTCN PAM
ugccucagccucccaaguag

SEQ ID NO: 26795 - RNA, 20 nt, Artificial Sequence
  spacer sequence CTCN PAM
uuggcuuaagcaauccucuu

SEQ ID NO: 26796 - RNA, 20 nt, Artificial Sequence
  spacer sequence CTCN PAM
aacuccuuggcuuaagcaau

SEQ ID NO: 26797 - RNA, 20 nt, Artificial Sequence
  spacer sequence CTCN PAM
cugcagccuccaacuccuug

SEQ ID NO: 26798 - RNA, 20 nt, Artificial Sequence
  spacer sequence CTCN PAM
agccugggcaacagagcaag

SEQ ID NO: 26799 - RNA, 20 nt, Artificial Sequence
  spacer sequence CTCN PAM
guugcccaggcuggagugca

SEQ ID NO: 26800 - RNA, 20 nt, Artificial Sequence
  spacer sequence CTCN PAM
uaaacgaaaaaaaaguggcc

SEQ ID NO: 26801 - RNA, 20 nt, Artificial Sequence
  spacer sequence CTCN PAM
caagugcugggauuacaggu

SEQ ID NO: 26802 - RNA, 20 nt, Artificial Sequence
  spacer sequence CTCN PAM
gccucccaagugcugggauu

SEQ ID NO: 26803 - RNA, 20 nt, Artificial Sequence
  spacer sequence CTCN PAM
ugauccgcccgccucggccu

SEQ ID NO: 26804 - RNA, 20 nt, Artificial Sequence
  spacer sequence CTCN PAM
ugaccucgugauccgcccgc

SEQ ID NO: 26805 - RNA, 20 nt, Artificial Sequence
  spacer sequence CTCN PAM
aucuccugaccucgugaucc

SEQ ID NO: 26806 - RNA, 20 nt, Artificial Sequence
  spacer sequence CTCN PAM
acuaaaaauacaaaaauauu

SEQ ID NO: 26807 - RNA, 20 nt, Artificial Sequence
  spacer sequence CTCN PAM
ggaggcugaggcagaagaau

SEQ ID NO: 26808 - RNA, 20 nt, Artificial Sequence
  spacer sequence CTCN PAM
cgagcagcugggacuacagg

SEQ ID NO: 26809 - RNA, 20 nt, Artificial Sequence
  spacer sequence CTCN PAM
gccucccgagcagcugggac

SEQ ID NO: 26810 - RNA, 20 nt, Artificial Sequence
  spacer sequence CTCN PAM
cggguucaggccauucuucu

SEQ ID NO: 26811 - RNA, 20 nt, Artificial Sequence
  spacer sequence CTCN PAM
gccucccggguucaggccau

SEQ ID NO: 26812 - RNA, 20 nt, Artificial Sequence
  spacer sequence CTCN PAM
cugcaagcuccgccucccgg

SEQ ID NO: 26813 - RNA, 20 nt, Artificial Sequence
  spacer sequence CTCN PAM
gcucacugcaagcuccgccu

SEQ ID NO: 26814 - RNA, 20 nt, Artificial Sequence
  spacer sequence CTCN PAM
gucacccaggcuggggugca

SEQ ID NO: 26815 - RNA, 20 nt, Artificial Sequence
  spacer sequence CTCN PAM
cucugucacccaggcugggg

SEQ ID NO: 26816 - RNA, 20 nt, Artificial Sequence
  spacer sequence CTCN PAM
aaaaaaaaaaaaaaaaaaaa

SEQ ID NO: 26817 - RNA, 20 nt, Artificial Sequence
  spacer sequence CTCN PAM
guuacuuuuuuuuuuuuuuu

SEQ ID NO: 26818 - RNA, 20 nt, Artificial Sequence
  spacer sequence CTCN PAM
gaaauacuuaucuccacagu

SEQ ID NO: 26819 - RNA, 20 nt, Artificial Sequence
  spacer sequence CTCN PAM
acaguauuuagauuuacagc

SEQ ID NO: 26820 - RNA, 20 nt, Artificial Sequence
  spacer sequence CTCN PAM
uguauauuuuaaauaccuua

SEQ ID NO: 26821 - RNA, 20 nt, Artificial Sequence
  spacer sequence CTCN PAM
gccucguguauauuuuaaau

SEQ ID NO: 26822 - RNA, 20 nt, Artificial Sequence
  spacer sequence CTCN PAM
cgccugcaaucccagcacuu

SEQ ID NO: 26823 - RNA, 20 nt, Artificial Sequence
  spacer sequence CTCN PAM
caaagugcugggauugcagg

SEQ ID NO: 26824 - RNA, 20 nt, Artificial Sequence
  spacer sequence CTCN PAM
gccucccaaagugcugggau

SEQ ID NO: 26825 - RNA, 20 nt, Artificial Sequence
  spacer sequence CTCN PAM
cgccucagccucccaaagug

SEQ ID NO: 26826 - RNA, 20 nt, Artificial Sequence
  spacer sequence CTCN PAM
cuauguugcccagucuggau

SEQ ID NO: 26827 - RNA, 20 nt, Artificial Sequence
  spacer sequence CTCN PAM
acaaaaaauuuaaaaauuag

SEQ ID NO: 26828 - RNA, 20 nt, Artificial Sequence
  spacer sequence CTCN PAM
ggaggcugaggcaggagauu

SEQ ID NO: 26829 - RNA, 20 nt, Artificial Sequence
  spacer sequence CTCN PAM
ugaguaucugggacuacagg

SEQ ID NO: 26830 - RNA, 20 nt, Artificial Sequence
  spacer sequence CTCN PAM
gccuccugaguaucugggac

SEQ ID NO: 26831 - RNA, 20 nt, Artificial Sequence
  spacer sequence CTCN PAM
ugccucagccuccugaguau

SEQ ID NO: 26832 - RNA, 20 nt, Artificial Sequence
  spacer sequence CTCN PAM
aguaaucuccugccucagcc

SEQ ID NO: 26833 - RNA, 20 nt, Artificial Sequence
  spacer sequence CTCN PAM
uggacucaaguaaucuccug

SEQ ID NO: 26834 - RNA, 20 nt, Artificial Sequence
  spacer sequence CTCN PAM
accuccuggacucaaguaau

SEQ ID NO: 26835 - RNA, 20 nt, Artificial Sequence
  spacer sequence CTCN PAM
agccugggugacagagcaag

SEQ ID NO: 26836 - RNA, 20 nt, Artificial Sequence
  spacer sequence CTCN PAM
gucacccaggcuggagugca

SEQ ID NO: 26837 - RNA, 20 nt, Artificial Sequence
  spacer sequence CTCN PAM
gccuuccgaagugcugggau

SEQ ID NO: 26838 - RNA, 20 nt, Artificial Sequence
  spacer sequence CTCN PAM
agugauccgccggccucagc

SEQ ID NO: 26839 - RNA, 20 nt, Artificial Sequence
  spacer sequence CTCN PAM
ugaccucaagugauccgccg

SEQ ID NO: 26840 - RNA, 20 nt, Artificial Sequence
  spacer sequence CTCN PAM
acuaaaaaugcaaaaauuag

SEQ ID NO: 26841 - RNA, 20 nt, Artificial Sequence
  spacer sequence CTCN PAM
gagucccagcuacauauaua

SEQ ID NO: 26842 - RNA, 20 nt, Artificial Sequence
  spacer sequence CTCN PAM
gaguagcugggaccguagac

SEQ ID NO: 26843 - RNA, 20 nt, Artificial Sequence
  spacer sequence CTCN PAM
caccuguaaucccagcacuu

SEQ ID NO: 26844 - RNA, 20 nt, Artificial Sequence
  spacer sequence CTCN PAM
caaagugcugggauuacagg

SEQ ID NO: 26845 - RNA, 20 nt, Artificial Sequence
  spacer sequence CTCN PAM
gccucccaaagugcugggau

SEQ ID NO: 26846 - RNA, 20 nt, Artificial Sequence
  spacer sequence CTCN PAM
ugaucugcccgccucagccu

SEQ ID NO: 26847 - RNA, 20 nt, Artificial Sequence
  spacer sequence CTCN PAM
ugaccucgugaucugcccgc

SEQ ID NO: 26848 - RNA, 20 nt, Artificial Sequence
  spacer sequence CTCN PAM
aucuccugaccucgugaucu

SEQ ID NO: 26849 - RNA, 20 nt, Artificial Sequence
  spacer sequence CTCN PAM
acuaaaaauacaaaaauuag

SEQ ID NO: 26850 - RNA, 20 nt, Artificial Sequence
  spacer sequence CTCN PAM
acacccagcuaauuuuugua

SEQ ID NO: 26851 - RNA, 20 nt, Artificial Sequence
  spacer sequence CTCN PAM
ccagcagcugggacuacagg

SEQ ID NO: 26852 - RNA, 20 nt, Artificial Sequence
  spacer sequence CTCN PAM
gccuccccagcagcugggac

SEQ ID NO: 26853 - RNA, 20 nt, Artificial Sequence
  spacer sequence CTCN PAM
ugccucagccuccccagcag

SEQ ID NO: 26854 - RNA, 20 nt, Artificial Sequence
  spacer sequence CTCN PAM
uggguucacgccauucuccu

SEQ ID NO: 26855 - RNA, 20 nt, Artificial Sequence
  spacer sequence CTCN PAM
accuccuggguucacgccau

SEQ ID NO: 26856 - RNA, 20 nt, Artificial Sequence
  spacer sequence CTCN PAM
cugcaagcuccaccuccugg

SEQ ID NO: 26857 - RNA, 20 nt, Artificial Sequence
  spacer sequence CTCN PAM
agccugggugacagagcgag

SEQ ID NO: 26858 - RNA, 20 nt, Artificial Sequence
  spacer sequence CTCN PAM
gucacccaggcuggagugca

SEQ ID NO: 26859 - RNA, 20 nt, Artificial Sequence
  spacer sequence CTCN PAM
cucugucacccaggcuggag

SEQ ID NO: 26860 - RNA, 20 nt, Artificial Sequence
  spacer sequence CTCN PAM
gucucaaaaaauaauaauaa

SEQ ID NO: 26861 - RNA, 20 nt, Artificial Sequence
  spacer sequence CTCN PAM
aaaaauaauaauaaaauaaa

SEQ ID NO: 26862 - RNA, 20 nt, Artificial Sequence
  spacer sequence CTCN PAM
guagccccauggccaguggc

SEQ ID NO: 26863 - RNA, 20 nt, Artificial Sequence
  spacer sequence CTCN PAM
gaauaacagaaauggucagc

SEQ ID NO: 26864 - RNA, 20 nt, Artificial Sequence
  spacer sequence CTCN PAM
caaaguacugugauuacagg

SEQ ID NO: 26865 - RNA, 20 nt, Artificial Sequence
  spacer sequence CTCN PAM
gccucccaaaguacugugau

SEQ ID NO: 26866 - RNA, 20 nt, Artificial Sequence
  spacer sequence CTCN PAM
ggugauccacccgccucagc

SEQ ID NO: 26867 - RNA, 20 nt, Artificial Sequence
  spacer sequence CTCN PAM
aaccccugaccucaggugau

SEQ ID NO: 26868 - RNA, 20 nt, Artificial Sequence
  spacer sequence CTCN PAM
acuaaaaauaaaauaaaaua

SEQ ID NO: 26869 - RNA, 20 nt, Artificial Sequence
  spacer sequence CTCN PAM
uauugaugcuucaaaacccc

SEQ ID NO: 26870 - RNA, 20 nt, Artificial Sequence
  spacer sequence CTCN PAM
cuugccuccucuuacaugca

SEQ ID NO: 26871 - RNA, 20 nt, Artificial Sequence
  spacer sequence CTCN PAM
ucuuacaugcagcuuuccuu

SEQ ID NO: 26872 - RNA, 20 nt, Artificial Sequence
  spacer sequence CTCN PAM
uacaugcagcuuuccuugau

SEQ ID NO: 26873 - RNA, 20 nt, Artificial Sequence
  spacer sequence CTCN PAM
gacagagccccaacucuccc

SEQ ID NO: 26874 - RNA, 20 nt, Artificial Sequence
  spacer sequence CTCN PAM
gucggaggaaucaaggaaag

SEQ ID NO: 26875 - RNA, 20 nt, Artificial Sequence
  spacer sequence CTCN PAM
cccuccaguuccuccagccc

SEQ ID NO: 26876 - RNA, 20 nt, Artificial Sequence
  spacer sequence CTCN PAM
cuccaguuccuccagcccca

SEQ ID NO: 26877 - RNA, 20 nt, Artificial Sequence
  spacer sequence CTCN PAM
aguuccuccagccccaagcc

SEQ ID NO: 26878 - RNA, 20 nt, Artificial Sequence
  spacer sequence CTCN PAM
agccccaagccucucauucu

SEQ ID NO: 26879 - RNA, 20 nt, Artificial Sequence
  spacer sequence CTCN PAM
cauucuguccuguacuugcu

SEQ ID NO: 26880 - RNA, 20 nt, Artificial Sequence
  spacer sequence CTCN PAM
uucuguccuguacuugcuca

SEQ ID NO: 26881 - RNA, 20 nt, Artificial Sequence
  spacer sequence CTCN PAM
uauagggaaacagggugggc

SEQ ID NO: 26882 - RNA, 20 nt, Artificial Sequence
  spacer sequence CTCN PAM
uacagggaauccggguuggg

SEQ ID NO: 26883 - RNA, 20 nt, Artificial Sequence
  spacer sequence CTCN PAM
gucuuccugggcaugggcug

SEQ ID NO: 26884 - RNA, 20 nt, Artificial Sequence
  spacer sequence CTCN PAM
ggcccagcccaugcccagga

SEQ ID NO: 26885 - RNA, 20 nt, Artificial Sequence
  spacer sequence CTCN PAM
ugagagccagcacugccugg

SEQ ID NO: 26886 - RNA, 20 nt, Artificial Sequence
  spacer sequence CTCN PAM
ggagaccuuagcucuggccc

SEQ ID NO: 26887 - RNA, 20 nt, Artificial Sequence
  spacer sequence CTCN PAM
caggagaccuuagcucuggc

SEQ ID NO: 26888 - RNA, 20 nt, Artificial Sequence
  spacer sequence CTCN PAM
ugccaggcagugcuggcucu

SEQ ID NO: 26889 - RNA, 20 nt, Artificial Sequence
  spacer sequence CTCN PAM
gggacagucuccugccaggc

SEQ ID NO: 26890 - RNA, 20 nt, Artificial Sequence
  spacer sequence CTCN PAM
gucuuaaaaaaaaaaacaaa

SEQ ID NO: 26891 - RNA, 20 nt, Artificial Sequence
  spacer sequence CTCN PAM
gucgcccaggcuggagugca

SEQ ID NO: 26892 - RNA, 20 nt, Artificial Sequence
  spacer sequence CTCN PAM
agccugggcgacagagcaag

SEQ ID NO: 26893 - RNA, 20 nt, Artificial Sequence
  spacer sequence CTCN PAM
acuuacuacaaccuccgccu

SEQ ID NO: 26894 - RNA, 20 nt, Artificial Sequence
  spacer sequence CTCN PAM
gccuccuggcuucaagugau

SEQ ID NO: 26895 - RNA, 20 nt, Artificial Sequence
  spacer sequence CTCN PAM
uggcuucaagugauccuccc

SEQ ID NO: 26896 - RNA, 20 nt, Artificial Sequence
  spacer sequence CTCN PAM
caccucagccuccucaguag

SEQ ID NO: 26897 - RNA, 20 nt, Artificial Sequence
  spacer sequence CTCN PAM
gccuccucaguagcuggaau

SEQ ID NO: 26898 - RNA, 20 nt, Artificial Sequence
  spacer sequence CTCN PAM
ucaguagcuggaauuacagg

SEQ ID NO: 26899 - RNA, 20 nt, Artificial Sequence
  spacer sequence CTCN PAM
guagcuggaauuacaggcau

SEQ ID NO: 26900 - RNA, 20 nt, Artificial Sequence
  spacer sequence CTCN PAM
acuaaaaauacaaaaauuag

SEQ ID NO: 26901 - RNA, 20 nt, Artificial Sequence
  spacer sequence CTCN PAM
gucucuacuaaaaauacaaa

SEQ ID NO: 26902 - RNA, 20 nt, Artificial Sequence
  spacer sequence CTCN PAM
ugaccucaagugauccgccc

SEQ ID NO: 26903 - RNA, 20 nt, Artificial Sequence
  spacer sequence CTCN PAM
agugauccgcccgccucggc

SEQ ID NO: 26904 - RNA, 20 nt, Artificial Sequence
  spacer sequence CTCN PAM
gccuuccaaagugcugggau

SEQ ID NO: 26905 - RNA, 20 nt, Artificial Sequence
  spacer sequence CTCN PAM
cgccugcaaucccagcacuu

SEQ ID NO: 26906 - RNA, 20 nt, Artificial Sequence
  spacer sequence CTCN PAM
gauuuuuauuuuuauuuauu

SEQ ID NO: 26907 - RNA, 20 nt, Artificial Sequence
  spacer sequence CTCN PAM
aaaaauaaauaaauaaauaa

SEQ ID NO: 26908 - RNA, 20 nt, Artificial Sequence
  spacer sequence CTCN PAM
cuaaaaauaaauaaauaaau

SEQ ID NO: 26909 - RNA, 20 nt, Artificial Sequence
  spacer sequence CTCN PAM
cucuaaaaauaaauaaauaa

SEQ ID NO: 26910 - RNA, 20 nt, Artificial Sequence
  spacer sequence CTCN PAM
ugcucugcugcccaggcugg

SEQ ID NO: 26911 - RNA, 20 nt, Artificial Sequence
  spacer sequence CTCN PAM
gcugcccaggcuggagcguc

SEQ ID NO: 26912 - RNA, 20 nt, Artificial Sequence
  spacer sequence CTCN PAM
agccugggcagcagagcaag

SEQ ID NO: 26913 - RNA, 20 nt, Artificial Sequence
  spacer sequence CTCN PAM
cugcagcuucgaccucuugg

SEQ ID NO: 26914 - RNA, 20 nt, Artificial Sequence
  spacer sequence CTCN PAM
ugggcucaacggauccuccc

SEQ ID NO: 26915 - RNA, 20 nt, Artificial Sequence
  spacer sequence CTCN PAM
acggauccucccccuucggc

SEQ ID NO: 26916 - RNA, 20 nt, Artificial Sequence
  spacer sequence CTCN PAM
cccuucggccucagccuccc

SEQ ID NO: 26917 - RNA, 20 nt, Artificial Sequence
  spacer sequence CTCN PAM
gccucccaaguagcuagaac

SEQ ID NO: 26918 - RNA, 20 nt, Artificial Sequence
  spacer sequence CTCN PAM
caaguagcuagaacuccagg

SEQ ID NO: 26919 - RNA, 20 nt, Artificial Sequence
  spacer sequence CTCN PAM
aggugcaagcuaccgcaccc

SEQ ID NO: 26920 - RNA, 20 nt, Artificial Sequence
  spacer sequence CTCN PAM
uuuggacugacaaacuccua

SEQ ID NO: 26921 - RNA, 20 nt, Artificial Sequence
  spacer sequence CTCN PAM
uacucauccaacaaagcccc

SEQ ID NO: 26922 - RNA, 20 nt, Artificial Sequence
  spacer sequence CTCN PAM
uccaacaaagccccagcucc

SEQ ID NO: 26923 - RNA, 20 nt, Artificial Sequence
  spacer sequence CTCN PAM
aauggccccuucucugagga

SEQ ID NO: 26924 - RNA, 20 nt, Artificial Sequence
  spacer sequence CTCN PAM
gaggaaccugcccugguucc

SEQ ID NO: 26925 - RNA, 20 nt, Artificial Sequence
  spacer sequence CTCN PAM
gagaaggggccauuggagcu

SEQ ID NO: 26926 - RNA, 20 nt, Artificial Sequence
  spacer sequence CTCN PAM
cagcuaguagaguucccugg

SEQ ID NO: 26927 - RNA, 20 nt, Artificial Sequence
  spacer sequence CTCN PAM
acuagcugggagguggacca

SEQ ID NO: 26928 - RNA, 20 nt, Artificial Sequence
  spacer sequence CTCN PAM
aaguggcagagaggggcccu

SEQ ID NO: 26929 - RNA, 20 nt, Artificial Sequence
  spacer sequence CTCN PAM
gccacuuagaggcgucuaac

SEQ ID NO: 26930 - RNA, 20 nt, Artificial Sequence
  spacer sequence CTCN PAM
cugccacuuagaggcgucua

SEQ ID NO: 26931 - RNA, 20 nt, Artificial Sequence
  spacer sequence CTCN PAM
uuccugccccaaagguagcc

SEQ ID NO: 26932 - RNA, 20 nt, Artificial Sequence
  spacer sequence CTCN PAM
ccuccccuuucuggcagaag

SEQ ID NO: 26933 - RNA, 20 nt, Artificial Sequence
  spacer sequence CTCN PAM
ccuuucuggcagaagagaag

SEQ ID NO: 26934 - RNA, 20 nt, Artificial Sequence
  spacer sequence CTCN PAM
ucugccagaaaggggagggg

SEQ ID NO: 26935 - RNA, 20 nt, Artificial Sequence
  spacer sequence CTCN PAM
gacuucucuucugccagaaa

SEQ ID NO: 26936 - RNA, 20 nt, Artificial Sequence
  spacer sequence CTCN PAM
aucucagacuucucuucugc

SEQ ID NO: 26937 - RNA, 20 nt, Artificial Sequence
  spacer sequence CTCN PAM
uucuccaucucagacuucuc

SEQ ID NO: 26938 - RNA, 20 nt, Artificial Sequence
  spacer sequence CTCN PAM
cucuuucuccaucucagacu

SEQ ID NO: 26939 - RNA, 20 nt, Artificial Sequence
  spacer sequence CTCN PAM
cacucuuucuccaucucaga

SEQ ID NO: 26940 - RNA, 20 nt, Artificial Sequence
  spacer sequence CTCN PAM
ugggcggcucucacucuuuc

SEQ ID NO: 26941 - RNA, 20 nt, Artificial Sequence
  spacer sequence CTCN PAM
gagcagagagcccgcaggag

SEQ ID NO: 26942 - RNA, 20 nt, Artificial Sequence
  spacer sequence CTCN PAM
gagcucgugggcggcucuca

SEQ ID NO: 26943 - RNA, 20 nt, Artificial Sequence
  spacer sequence CTCN PAM
gcucagagcucgugggcggc

SEQ ID NO: 26944 - RNA, 20 nt, Artificial Sequence
  spacer sequence CTCN PAM
cugcucagagcucgugggcg

SEQ ID NO: 26945 - RNA, 20 nt, Artificial Sequence
  spacer sequence CTCN PAM
ugcgggcucucugcucagag

SEQ ID NO: 26946 - RNA, 20 nt, Artificial Sequence
  spacer sequence CTCN PAM
gccccucccugccucaguuu

SEQ ID NO: 26947 - RNA, 20 nt, Artificial Sequence
  spacer sequence CTCN PAM
cugccucaguuucccguggc

SEQ ID NO: 26948 - RNA, 20 nt, Artificial Sequence
  spacer sequence CTCN PAM
guuucccguggcaucaaagg

SEQ ID NO: 26949 - RNA, 20 nt, Artificial Sequence
  spacer sequence CTCN PAM
cccccuuugaugccacggga

SEQ ID NO: 26950 - RNA, 20 nt, Artificial Sequence
  spacer sequence CTCN PAM
aggccucuggugacgggggu

SEQ ID NO: 26951 - RNA, 20 nt, Artificial Sequence
  spacer sequence CTCN PAM
ggugacgggggugcugugcc

SEQ ID NO: 26952 - RNA, 20 nt, Artificial Sequence
  spacer sequence CTCN PAM
gucgcccccggacccccgcc

SEQ ID NO: 26953 - RNA, 20 nt, Artificial Sequence
  spacer sequence CTCN PAM
ggaaguccgcggccgcagga

SEQ ID NO: 26954 - RNA, 20 nt, Artificial Sequence
  spacer sequence CTCN PAM
aggccuuauaaggacauuug

SEQ ID NO: 26955 - RNA, 20 nt, Artificial Sequence
  spacer sequence CTCN PAM
gggccaaucagcggcggggg

SEQ ID NO: 26956 - RNA, 20 nt, Artificial Sequence
  spacer sequence CTCN PAM
gcgcgccacgcccccgccgc

SEQ ID NO: 26957 - RNA, 20 nt, Artificial Sequence
  spacer sequence CTCN PAM
uggcuggcgggcgggcggcg

SEQ ID NO: 26958 - RNA, 20 nt, Artificial Sequence
  spacer sequence CTCN PAM
acgcaguucaacaagggccc

SEQ ID NO: 26959 - RNA, 20 nt, Artificial Sequence
  spacer sequence CTCN PAM
uacgggcugucggccgaggu

SEQ ID NO: 26960 - RNA, 20 nt, Artificial Sequence
  spacer sequence CTCN PAM
gccgacagcccguacgaggg

SEQ ID NO: 26961 - RNA, 20 nt, Artificial Sequence
  spacer sequence CTCN PAM
cccgguucuugaccucggcc

SEQ ID NO: 26962 - RNA, 20 nt, Artificial Sequence
  spacer sequence CTCN PAM
cucacccgguucuugaccuc

SEQ ID NO: 26963 - RNA, 20 nt, Artificial Sequence
  spacer sequence CTCN PAM
gaccggugcaggagccccca

SEQ ID NO: 26964 - RNA, 20 nt, Artificial Sequence
  spacer sequence CTCN PAM
ugcaccggucggagcgugcg

SEQ ID NO: 26965 - RNA, 20 nt, Artificial Sequence
  spacer sequence CTCN PAM
cgggcagggagcuuggagac

SEQ ID NO: 26966 - RNA, 20 nt, Artificial Sequence
  spacer sequence CTCN PAM
cugcccgggaggugccgggg

SEQ ID NO: 26967 - RNA, 20 nt, Artificial Sequence
  spacer sequence CTCN PAM
aagcucccugcccgggaggu

SEQ ID NO: 26968 - RNA, 20 nt, Artificial Sequence
  spacer sequence CTCN PAM
cugacgccugguggggggau

SEQ ID NO: 26969 - RNA, 20 nt, Artificial Sequence
  spacer sequence CTCN PAM
gggggugcccgcagacaucc

SEQ ID NO: 26970 - RNA, 20 nt, Artificial Sequence
  spacer sequence CTCN PAM
cgcgaaucuuggggagcacc

SEQ ID NO: 26971 - RNA, 20 nt, Artificial Sequence
  spacer sequence CTCN PAM
ccaagauucgcgggagccuc

SEQ ID NO: 26972 - RNA, 20 nt, Artificial Sequence
  spacer sequence CTCN PAM
gaccugggugcuccccaaga

SEQ ID NO: 26973 - RNA, 20 nt, Artificial Sequence
  spacer sequence CTCN PAM
ucccccagaucucagaccug

SEQ ID NO: 26974 - RNA, 20 nt, Artificial Sequence
  spacer sequence CTCN PAM
ccauggccccaggaccccca

SEQ ID NO: 26975 - RNA, 20 nt, Artificial Sequence
  spacer sequence CTCN PAM
accuucgagaagguccguuc

SEQ ID NO: 26976 - RNA, 20 nt, Artificial Sequence
  spacer sequence CTCN PAM
aagguugagugggcgccagg

SEQ ID NO: 26977 - RNA, 20 nt, Artificial Sequence
  spacer sequence CTCN PAM
gggggucugggggggacccc

SEQ ID NO: 26978 - RNA, 20 nt, Artificial Sequence
  spacer sequence CTCN PAM
uggccacacuucugcuuuug

SEQ ID NO: 26979 - RNA, 20 nt, Artificial Sequence
  spacer sequence CTCN PAM
uagcuuugggaggggaaggg

SEQ ID NO: 26980 - RNA, 20 nt, Artificial Sequence
  spacer sequence CTCN PAM
caaagcuaagaggccccaaa

SEQ ID NO: 26981 - RNA, 20 nt, Artificial Sequence
  spacer sequence CTCN PAM
gccaugccccuuccccuccc

SEQ ID NO: 26982 - RNA, 20 nt, Artificial Sequence
  spacer sequence CTCN PAM
aaaaccacucggccaugccc

SEQ ID NO: 26983 - RNA, 20 nt, Artificial Sequence
  spacer sequence CTCN PAM
gggacaccuugggggugucu

SEQ ID NO: 26984 - RNA, 20 nt, Artificial Sequence
  spacer sequence CTCN PAM
ccccaagacacccccaaggu

SEQ ID NO: 26985 - RNA, 20 nt, Artificial Sequence
  spacer sequence CTCN PAM
caucugacuaauuuaaacgg

SEQ ID NO: 26986 - RNA, 20 nt, Artificial Sequence
  spacer sequence CTCN PAM
uuguuauccguuuaaauuag

SEQ ID NO: 26987 - RNA, 20 nt, Artificial Sequence
  spacer sequence CTCN PAM
gaagguggcccugagauaug

SEQ ID NO: 26988 - RNA, 20 nt, Artificial Sequence
  spacer sequence CTCN PAM
gggccaccuucagagaaccu

SEQ ID NO: 26989 - RNA, 20 nt, Artificial Sequence
  spacer sequence CTCN PAM
aaagaagagcuggggcccgg

SEQ ID NO: 26990 - RNA, 20 nt, Artificial Sequence
  spacer sequence CTCN PAM
ucuuucgaggcugcaaaacc

SEQ ID NO: 26991 - RNA, 20 nt, Artificial Sequence
  spacer sequence CTCN PAM
cgcccguaaucccagcacuu

SEQ ID NO: 26992 - RNA, 20 nt, Artificial Sequence
  spacer sequence CTCN PAM
gccccccaaagugcugggau

SEQ ID NO: 26993 - RNA, 20 nt, Artificial Sequence
  spacer sequence CTCN PAM
agccauccacccagcuccgc

SEQ ID NO: 26994 - RNA, 20 nt, Artificial Sequence
  spacer sequence CTCN PAM
cugggcucaagccauccacc

SEQ ID NO: 26995 - RNA, 20 nt, Artificial Sequence
  spacer sequence CTCN PAM
aacucgcugggcucaagcca

SEQ ID NO: 26996 - RNA, 20 nt, Artificial Sequence
  spacer sequence CTCN PAM
auaauuaaaaacaagccagg

SEQ ID NO: 26997 - RNA, 20 nt, Artificial Sequence
  spacer sequence CTCN PAM
ccuagcccuggcuuguuuuu

SEQ ID NO: 26998 - RNA, 20 nt, Artificial Sequence
  spacer sequence CTCN PAM
uaaaaagugucuccccuagc

SEQ ID NO: 26999 - RNA, 20 nt, Artificial Sequence
  spacer sequence CTCN PAM
cuuaaaaagugucuccccua

SEQ ID NO: 27000 - RNA, 20 nt, Artificial Sequence
  spacer sequence CTCN PAM
gagaggaccagacacuucug

SEQ ID NO: 27001 - RNA, 20 nt, Artificial Sequence
  spacer sequence CTCN PAM
gagcuagaaccacaagugcu

SEQ ID NO: 27002 - RNA, 20 nt, Artificial Sequence
  spacer sequence CTCN PAM
cugagcuagaaccacaagug

SEQ ID NO: 27003 - RNA, 20 nt, Artificial Sequence
  spacer sequence CTCN PAM
caucacaacccccgcccccc

SEQ ID NO: 27004 - RNA, 20 nt, Artificial Sequence
  spacer sequence CTCN PAM
aggaccuuccagcuggaggg

SEQ ID NO: 27005 - RNA, 20 nt, Artificial Sequence
  spacer sequence CTCN PAM
agcuggaagguccuggaggg

SEQ ID NO: 27006 - RNA, 20 nt, Artificial Sequence
  spacer sequence CTCN PAM
cccgacgcccacugggcacc

SEQ ID NO: 27007 - RNA, 20 nt, Artificial Sequence
  spacer sequence CTCN PAM
gcacgcucugagggcaccgg

SEQ ID NO: 27008 - RNA, 20 nt, Artificial Sequence
  spacer sequence CTCN PAM
gagggcaccggcccugccag

SEQ ID NO: 27009 - RNA, 20 nt, Artificial Sequence
  spacer sequence CTCN PAM
gagcgugcagaggcaguuuc

SEQ ID NO: 27010 - RNA, 20 nt, Artificial Sequence
  spacer sequence CTCN PAM
agggccggcagacuggaggg

SEQ ID NO: 27011 - RNA, 20 nt, Artificial Sequence
  spacer sequence CTCN PAM
agucugccggcccuggagug

SEQ ID NO: 27012 - RNA, 20 nt, Artificial Sequence
  spacer sequence CTCN PAM
cuccagucugccggcccugg

SEQ ID NO: 27013 - RNA, 20 nt, Artificial Sequence
  spacer sequence CTCN PAM
cagcggggaagcaggaauuc

SEQ ID NO: 27014 - RNA, 20 nt, Artificial Sequence
  spacer sequence CTCN PAM
uggccaaaaagggaggcuga

SEQ ID NO: 27015 - RNA, 20 nt, Artificial Sequence
  spacer sequence CTCN PAM
cuuuuuggccaagagcuggu

SEQ ID NO: 27016 - RNA, 20 nt, Artificial Sequence
  spacer sequence CTCN PAM
gccucccuuuuuggccaaga

SEQ ID NO: 27017 - RNA, 20 nt, Artificial Sequence
  spacer sequence CTCN PAM
ggccuugaccaccccaagcc

SEQ ID NO: 27018 - RNA, 20 nt, Artificial Sequence
  spacer sequence CTCN PAM
cgacuccuccuucaaggggc

SEQ ID NO: 27019 - RNA, 20 nt, Artificial Sequence
  spacer sequence CTCN PAM
uccuucaaggggccaucugc

SEQ ID NO: 27020 - RNA, 20 nt, Artificial Sequence
  spacer sequence CTCN PAM
uucaaggggccaucugcacc

SEQ ID NO: 27021 - RNA, 20 nt, Artificial Sequence
  spacer sequence CTCN PAM
augaaugcagggugcagaug

SEQ ID NO: 27022 - RNA, 20 nt, Artificial Sequence
  spacer sequence CTCN PAM
gggucccuguggacaccggu

SEQ ID NO: 27023 - RNA, 20 nt, Artificial Sequence
  spacer sequence CTCN PAM
cacuuccgcaggcccagcag

SEQ ID NO: 27024 - RNA, 20 nt, Artificial Sequence
  spacer sequence CTCN PAM
ugugcccgcucccacuuccg

SEQ ID NO: 27025 - RNA, 20 nt, Artificial Sequence
  spacer sequence CTCN PAM
ggaagccgccccacccuccu

SEQ ID NO: 27026 - RNA, 20 nt, Artificial Sequence
  spacer sequence CTCN PAM
cccccgccagggcagguauc

SEQ ID NO: 27027 - RNA, 20 nt, Artificial Sequence
  spacer sequence CTCN PAM
guccucacccccgccagggc

SEQ ID NO: 27028 - RNA, 20 nt, Artificial Sequence
  spacer sequence CTCN PAM
uccagccucuguccucaccc

SEQ ID NO: 27029 - RNA, 20 nt, Artificial Sequence
  spacer sequence CTCN PAM
ccgcgcaacccucagucugu

SEQ ID NO: 27030 - RNA, 20 nt, Artificial Sequence
  spacer sequence CTCN PAM
gucuguccguuuggagggug

SEQ ID NO: 27031 - RNA, 20 nt, Artificial Sequence
  spacer sequence CTCN PAM
aaacggacagacugaggguu

SEQ ID NO: 27032 - RNA, 20 nt, Artificial Sequence
  spacer sequence CTCN PAM
cccacccuccaaacggacag

SEQ ID NO: 27033 - RNA, 20 nt, Artificial Sequence
  spacer sequence CTCN PAM
caauuagaaaccagcuuccc

SEQ ID NO: 27034 - RNA, 20 nt, Artificial Sequence
  spacer sequence CTCN PAM
cacccgcuuuaccggcugcu

SEQ ID NO: 27035 - RNA, 20 nt, Artificial Sequence
  spacer sequence CTCN PAM
ggcuguuucaagcagccggu

SEQ ID NO: 27036 - RNA, 20 nt, Artificial Sequence
  spacer sequence CTCN PAM
guugacucccggcuggacgg

SEQ ID NO: 27037 - RNA, 20 nt, Artificial Sequence
  spacer sequence CTCN PAM
cggcuggacggcacggaggc

SEQ ID NO: 27038 - RNA, 20 nt, Artificial Sequence
  spacer sequence CTCN PAM
gugccguccagccgggaguc

SEQ ID NO: 27039 - RNA, 20 nt, Artificial Sequence
  spacer sequence CTCN PAM
gauccacagugucugcggcc

SEQ ID NO: 27040 - RNA, 20 nt, Artificial Sequence
  spacer sequence CTCN PAM
ccggcuaaaucugaaccagc

SEQ ID NO: 27041 - RNA, 20 nt, Artificial Sequence
  spacer sequence CTCN PAM
cccacccccgcccccccgcu

SEQ ID NO: 27042 - RNA, 20 nt, Artificial Sequence
  spacer sequence CTCN PAM
ggggcccagguccccuggcc

SEQ ID NO: 27043 - RNA, 20 nt, Artificial Sequence
  spacer sequence CTCN PAM
gccggcucaggggcccaggu

SEQ ID NO: 27044 - RNA, 20 nt, Artificial Sequence
  spacer sequence CTCN PAM
uuccucgggaucaaaguugc

SEQ ID NO: 27045 - RNA, 20 nt, Artificial Sequence
  spacer sequence CTCN PAM
ggaucaaaguugccggcggg

SEQ ID NO: 27046 - RNA, 20 nt, Artificial Sequence
  spacer sequence CTCN PAM
cagcccacccagcuuggcuu

SEQ ID NO: 27047 - RNA, 20 nt, Artificial Sequence
  spacer sequence CTCN PAM
ccgccuuugccuccucuggg

SEQ ID NO: 27048 - RNA, 20 nt, Artificial Sequence
  spacer sequence CTCN PAM
ucugggcuacgagcuguuuc

SEQ ID NO: 27049 - RNA, 20 nt, Artificial Sequence
  spacer sequence CTCN PAM
gggcuacgagcuguuuccag

SEQ ID NO: 27050 - RNA, 20 nt, Artificial Sequence
  spacer sequence CTCN PAM
uagcccagaggaggcaaagg

SEQ ID NO: 27051 - RNA, 20 nt, Artificial Sequence
  spacer sequence CTCN PAM
ggggacccuaacccaaauca

SEQ ID NO: 27052 - RNA, 20 nt, Artificial Sequence
  spacer sequence CTCN PAM
ggggacccuaacccaaauca

SEQ ID NO: 27053 - RNA, 20 nt, Artificial Sequence
  spacer sequence CTCN PAM
ggggacccuaacccaaauca

SEQ ID NO: 27054 - RNA, 20 nt, Artificial Sequence
  spacer sequence CTCN PAM
ggggacccuacccaaaucau

SEQ ID NO: 27055 - RNA, 20 nt, Artificial Sequence
  spacer sequence CTCN PAM
ggggacccuaacccaaauca

SEQ ID NO: 27056 - RNA, 20 nt, Artificial Sequence
  spacer sequence CTCN PAM
ggggacccuaacccaaauca

SEQ ID NO: 27057 - RNA, 20 nt, Artificial Sequence
  spacer sequence CTCN PAM
ggggacccuaacccaaauca

SEQ ID NO: 27058 - RNA, 20 nt, Artificial Sequence
  spacer sequence CTCN PAM
ggggacccuaacccaaauca

SEQ ID NO: 27059 - RNA, 20 nt, Artificial Sequence
  spacer sequence CTCN PAM
ggggacccuaacccaaauca

SEQ ID NO: 27060 - RNA, 20 nt, Artificial Sequence
  spacer sequence CTCN PAM
ggggacccuaacccaaauca

SEQ ID NO: 27061 - RNA, 20 nt, Artificial Sequence
  spacer sequence CTCN PAM
ggggacccuaacccaaauca

SEQ ID NO: 27062 - RNA, 20 nt, Artificial Sequence
  spacer sequence CTCN PAM
ggggacccuaacccaaauca

SEQ ID NO: 27063 - RNA, 20 nt, Artificial Sequence
  spacer sequence CTCN PAM
uccugggauuauuuggguua

SEQ ID NO: 27064 - RNA, 20 nt, Artificial Sequence
  spacer sequence CTCN PAM
ucucuuccugggauuauuug

SEQ ID NO: 27065 - RNA, 20 nt, Artificial Sequence
  spacer sequence CTCN PAM
gcuuccucaucucuuccugg

SEQ ID NO: 27066 - RNA, 20 nt, Artificial Sequence
  spacer sequence CTCN PAM
gccuccgcuuccucaucucu

SEQ ID NO: 27067 - RNA, 20 nt, Artificial Sequence
  spacer sequence CTCN PAM
ccacucagccuccgcuuccu

SEQ ID NO: 27068 - RNA, 20 nt, Artificial Sequence
  spacer sequence CTCN PAM
ccagguucccgcggacagcu

SEQ ID NO: 27069 - RNA, 20 nt, Artificial Sequence
  spacer sequence CTCN PAM
gcacccaucuccccagguuc

SEQ ID NO: 27070 - RNA, 20 nt, Artificial Sequence
  spacer sequence CTCN PAM
cugcucugcacccaucuccc

SEQ ID NO: 27071 - RNA, 20 nt, Artificial Sequence
  spacer sequence CTCN PAM
cccugcucugcacccaucuc

SEQ ID NO: 27072 - RNA, 20 nt, Artificial Sequence
  spacer sequence CTCN PAM
cuuuucuuucuuuuuuuuuu

SEQ ID NO: 27073 - RNA, 20 nt, Artificial Sequence
  spacer sequence CTCN PAM
uuucuuucuuuuuuuuuuua

SEQ ID NO: 27074 - RNA, 20 nt, Artificial Sequence
  spacer sequence CTCN PAM
gucuuaaaaaaaaaaagaaa

SEQ ID NO: 27075 - RNA, 20 nt, Artificial Sequence
  spacer sequence CTCN PAM
cucuguuccaggcuggagug

SEQ ID NO: 27076 - RNA, 20 nt, Artificial Sequence
  spacer sequence CTCN PAM
guuccaggcuggagugaagu

SEQ ID NO: 27077 - RNA, 20 nt, Artificial Sequence
  spacer sequence CTCN PAM
agccuggaacagagugagcc

SEQ ID NO: 27078 - RNA, 20 nt, Artificial Sequence
  spacer sequence CTCN PAM
cugccuccucugccuccugg

SEQ ID NO: 27079 - RNA, 20 nt, Artificial Sequence
  spacer sequence CTCN PAM
ucugccuccuggguucaagc

SEQ ID NO: 27080 - RNA, 20 nt, Artificial Sequence
  spacer sequence CTCN PAM
gccuccuggguucaagcgau

SEQ ID NO: 27081 - RNA, 20 nt, Artificial Sequence
  spacer sequence CTCN PAM
uggguucaagcgauucuccu

SEQ ID NO: 27082 - RNA, 20 nt, Artificial Sequence
  spacer sequence CTCN PAM
ugccucagccucccaaguag

SEQ ID NO: 27083 - RNA, 20 nt, Artificial Sequence
  spacer sequence CTCN PAM
gccucccaaguagcugggac

SEQ ID NO: 27084 - RNA, 20 nt, Artificial Sequence
  spacer sequence CTCN PAM
caaguagcugggacuacagg

SEQ ID NO: 27085 - RNA, 20 nt, Artificial Sequence
  spacer sequence CTCN PAM
uuuuuguauuuuaguacaga

SEQ ID NO: 27086 - RNA, 20 nt, Artificial Sequence
  spacer sequence CTCN PAM
aacuccugaccucagaugau

SEQ ID NO: 27087 - RNA, 20 nt, Artificial Sequence
  spacer sequence CTCN PAM
ugaccucagaugauccgccc

SEQ ID NO: 27088 - RNA, 20 nt, Artificial Sequence
  spacer sequence CTCN PAM
gaugauccgcccgccuuggc

SEQ ID NO: 27089 - RNA, 20 nt, Artificial Sequence
  spacer sequence CTCN PAM
caaagugcugggauuguagg

SEQ ID NO: 27090 - RNA, 20 nt, Artificial Sequence
  spacer sequence CTCN PAM
caccuacaaucccagcacuu

SEQ ID NO: 27091 - RNA, 20 nt, Artificial Sequence
  spacer sequence CTCN PAM
cuccagcguuuaucucccgc

SEQ ID NO: 27092 - RNA, 20 nt, Artificial Sequence
  spacer sequence CTCN PAM
agcguuuaucucccgcuccc

SEQ ID NO: 27093 - RNA, 20 nt, Artificial Sequence
  spacer sequence CTCN PAM
cgcucccgcuacacgaccug

SEQ ID NO: 27094 - RNA, 20 nt, Artificial Sequence
  spacer sequence CTCN PAM
cgcuacacgaccugccccca

SEQ ID NO: 27095 - RNA, 20 nt, Artificial Sequence
  spacer sequence CTCN PAM
gugcugucuccgcggucacu

SEQ ID NO: 27096 - RNA, 20 nt, Artificial Sequence
  spacer sequence CTCN PAM
gcggucacuaguggcuggau

SEQ ID NO: 27097 - RNA, 20 nt, Artificial Sequence
  spacer sequence CTCN PAM
agguccccacuggugcacac

SEQ ID NO: 27098 - RNA, 20 nt, Artificial Sequence
  spacer sequence CTCN PAM
agugucccuauccagccacu

SEQ ID NO: 27099 - RNA, 20 nt, Artificial Sequence
  spacer sequence CTCN PAM
ugggcagugggugugcacca

SEQ ID NO: 27100 - RNA, 20 nt, Artificial Sequence
  spacer sequence CTCN PAM
gagcaccgaaggccaagaaa

SEQ ID NO: 27101 - RNA, 20 nt, Artificial Sequence
  spacer sequence CTCN PAM
gagacaccgccguggggaau

SEQ ID NO: 27102 - RNA, 20 nt, Artificial Sequence
  spacer sequence CTCN PAM
uugccaccgauucccugcca

SEQ ID NO: 27103 - RNA, 20 nt, Artificial Sequence
  spacer sequence CTCN PAM
agucacgcaccuggcuccuu

SEQ ID NO: 27104 - RNA, 20 nt, Artificial Sequence
  spacer sequence CTCN PAM
ggggcagcuccuucgggagu

SEQ ID NO: 27105 - RNA, 20 nt, Artificial Sequence
  spacer sequence CTCN PAM
uucgggaguugcuaagaagc

SEQ ID NO: 27106 - RNA, 20 nt, Artificial Sequence
  spacer sequence CTCN PAM
cgaaggagcugcccccgagg

SEQ ID NO: 27107 - RNA, 20 nt, Artificial Sequence
  spacer sequence CTCN PAM
caccuguaaucccagcacuu

SEQ ID NO: 27108 - RNA, 20 nt, Artificial Sequence
  spacer sequence CTCN PAM
aaagugcugggauuacaggu

SEQ ID NO: 27109 - RNA, 20 nt, Artificial Sequence
  spacer sequence CTCN PAM
gcccuccaaagugcugggau

SEQ ID NO: 27110 - RNA, 20 nt, Artificial Sequence
  spacer sequence CTCN PAM
ugaucugcccgucucagccc

SEQ ID NO: 27111 - RNA, 20 nt, Artificial Sequence
  spacer sequence CTCN PAM
ugaccucgugaucugcccgu

SEQ ID NO: 27112 - RNA, 20 nt, Artificial Sequence
  spacer sequence CTCN PAM
aucuccugaccucgugaucu

SEQ ID NO: 27113 - RNA, 20 nt, Artificial Sequence
  spacer sequence CTCN PAM
auuaaaaauacaaaaaauga

SEQ ID NO: 27114 - RNA, 20 nt, Artificial Sequence
  spacer sequence CTCN PAM
uuuuuuguauuuuuaauaga

SEQ ID NO: 27115 - RNA, 20 nt, Artificial Sequence
  spacer sequence CTCN PAM
ggaggcugaggcaggagaau

SEQ ID NO: 27116 - RNA, 20 nt, Artificial Sequence
  spacer sequence CTCN PAM
cgaguagcugggacugcagg

SEQ ID NO: 27117 - RNA, 20 nt, Artificial Sequence
  spacer sequence CTCN PAM
gccucccgaguagcugggac

SEQ ID NO: 27118 - RNA, 20 nt, Artificial Sequence
  spacer sequence CTCN PAM
ugccucagccucccgaguag

SEQ ID NO: 27119 - RNA, 20 nt, Artificial Sequence
  spacer sequence CTCN PAM
ccgguucaggccauucuccu

SEQ ID NO: 27120 - RNA, 20 nt, Artificial Sequence
  spacer sequence CTCN PAM
gccuccccgguucaggccau

SEQ ID NO: 27121 - RNA, 20 nt, Artificial Sequence
  spacer sequence CTCN PAM
cugcaagcuccgccuccccg

SEQ ID NO: 27122 - RNA, 20 nt, Artificial Sequence
  spacer sequence CTCN PAM
gcucacugcaagcuccgccu

SEQ ID NO: 27123 - RNA, 20 nt, Artificial Sequence
  spacer sequence CTCN PAM
agccugggcgacagagugag

SEQ ID NO: 27124 - RNA, 20 nt, Artificial Sequence
  spacer sequence CTCN PAM
gucgcccaggcuggagugca

SEQ ID NO: 27125 - RNA, 20 nt, Artificial Sequence
  spacer sequence CTCN PAM
cucugucgcccaggcuggag

SEQ ID NO: 27126 - RNA, 20 nt, Artificial Sequence
  spacer sequence CTCN PAM
gucucaaaaaaaauaaaaaa

SEQ ID NO: 27127 - RNA, 20 nt, Artificial Sequence
  spacer sequence CTCN PAM
aaaaaaauaaaaaagaaaaa

SEQ ID NO: 27128 - RNA, 20 nt, Artificial Sequence
  spacer sequence CTCN PAM
uuuuucuuuuuuauuuuuuu

SEQ ID NO: 27129 - RNA, 20 nt, Artificial Sequence
  spacer sequence CTCN PAM
ccgcuauaucacaccugacg

SEQ ID NO: 27130 - RNA, 20 nt, Artificial Sequence
  spacer sequence CTCN PAM
ccuccccgcuauaucacacc

SEQ ID NO: 27131 - RNA, 20 nt, Artificial Sequence
  spacer sequence CTCN PAM
ccgcccugccuucucaccuc

SEQ ID NO: 27132 - RNA, 20 nt, Artificial Sequence
  spacer sequence CTCN PAM
cggugcaggacaaaccuggc

SEQ ID NO: 27133 - RNA, 20 nt, Artificial Sequence
  spacer sequence CTCN PAM
aauccacucccggugcagga

SEQ ID NO: 27134 - RNA, 20 nt, Artificial Sequence
  spacer sequence CTCN PAM
cugauaaacaucagcucuaa

SEQ ID NO: 27135 - RNA, 20 nt, Artificial Sequence
  spacer sequence CTCN PAM
aagcaggccgacaaccggcu

SEQ ID NO: 27136 - RNA, 20 nt, Artificial Sequence
  spacer sequence CTCN PAM
cuuuucccaucauugggggc

SEQ ID NO: 27137 - RNA, 20 nt, Artificial Sequence
  spacer sequence CTCN PAM
ccacacccacgcagaugcuc

SEQ ID NO: 27138 - RNA, 20 nt, Artificial Sequence
  spacer sequence CTCN PAM
aggccgcucuaucugcuguu

SEQ ID NO: 27139 - RNA, 20 nt, Artificial Sequence
  spacer sequence CTCN PAM
aucugcuguugcccuggagu

SEQ ID NO: 27140 - RNA, 20 nt, Artificial Sequence
  spacer sequence CTCN PAM
agggcaacagcagauagagc

SEQ ID NO: 27141 - RNA, 20 nt, Artificial Sequence
  spacer sequence CTCN PAM
gcagagcuucugugggguuc

SEQ ID NO: 27142 - RNA, 20 nt, Artificial Sequence
  spacer sequence CTCN PAM
gcagaggguggggccgggga

SEQ ID NO: 27143 - RNA, 20 nt, Artificial Sequence
  spacer sequence CTCN PAM
gucucgugcccuuugcucca

SEQ ID NO: 27144 - RNA, 20 nt, Artificial Sequence
  spacer sequence CTCN PAM
ugcccuuugcuccaccagcu

SEQ ID NO: 27145 - RNA, 20 nt, Artificial Sequence
  spacer sequence CTCN PAM
accagcuccuguccaaauau

SEQ ID NO: 27146 - RNA, 20 nt, Artificial Sequence
  spacer sequence CTCN PAM
uguccaaauaugacccccag

SEQ ID NO: 27147 - RNA, 20 nt, Artificial Sequence
  spacer sequence CTCN PAM
uucugggggucauauuugga

SEQ ID NO: 27148 - RNA, 20 nt, Artificial Sequence
  spacer sequence CTCN PAM
gccuccuucugggggucaua

SEQ ID NO: 27149 - RNA, 20 nt, Artificial Sequence
  spacer sequence CTCN PAM
gcaccuggaucgagggacuc

SEQ ID NO: 27150 - RNA, 20 nt, Artificial Sequence
  spacer sequence CTCN PAM
auccaggugcggagcucugc

SEQ ID NO: 27151 - RNA, 20 nt, Artificial Sequence
  spacer sequence CTCN PAM
ccggccucuccaucggcccc

SEQ ID NO: 27152 - RNA, 20 nt, Artificial Sequence
  spacer sequence CTCN PAM
ccaucggccccgacuuccag

SEQ ID NO: 27153 - RNA, 20 nt, Artificial Sequence
  spacer sequence CTCN PAM
aucggccccgacuuccagaa

SEQ ID NO: 27154 - RNA, 20 nt, Artificial Sequence
  spacer sequence CTCN PAM
cgugcauaagauaguuccau

SEQ ID NO: 27155 - RNA, 20 nt, Artificial Sequence
  spacer sequence CTCN PAM
cacuuaacaaaucuugguuu

SEQ ID NO: 27156 - RNA, 20 nt, Artificial Sequence
  spacer sequence CTCN PAM
cuuuuuuucuuaauuaagaa

SEQ ID NO: 27157 - RNA, 20 nt, Artificial Sequence
  spacer sequence CTCN PAM
ugccuguaaucccagcacuu

SEQ ID NO: 27158 - RNA, 20 nt, Artificial Sequence
  spacer sequence CTCN PAM
caaaaauacaaaauuagcug

SEQ ID NO: 27159 - RNA, 20 nt, Artificial Sequence
  spacer sequence CTCN PAM
cccaaaaauacaaaauuagc

SEQ ID NO: 27160 - RNA, 20 nt, Artificial Sequence
  spacer sequence CTCN PAM
ugaccucaggugauccuccc

SEQ ID NO: 27161 - RNA, 20 nt, Artificial Sequence
  spacer sequence CTCN PAM
ggugauccucccaccuuggc

SEQ ID NO: 27162 - RNA, 20 nt, Artificial Sequence
  spacer sequence CTCN PAM
caccuuggccucccaaagug

SEQ ID NO: 27163 - RNA, 20 nt, Artificial Sequence
  spacer sequence CTCN PAM
caaagugcugggauuacagg

SEQ ID NO: 27164 - RNA, 20 nt, Artificial Sequence
  spacer sequence CTCN PAM
cgccuguaaucccagcacuu

SEQ ID NO: 27165 - RNA, 20 nt, Artificial Sequence
  spacer sequence CTCN PAM
ucucuccaccaugaccugcu

SEQ ID NO: 27166 - RNA, 20 nt, Artificial Sequence
  spacer sequence CTCN PAM
ccaccaugaccugcuccacc

SEQ ID NO: 27167 - RNA, 20 nt, Artificial Sequence
  spacer sequence CTCN PAM
accaugaccugcuccacccc

SEQ ID NO: 27168 - RNA, 20 nt, Artificial Sequence
  spacer sequence CTCN PAM
accccuccuuccucuccagg

SEQ ID NO: 27169 - RNA, 20 nt, Artificial Sequence
  spacer sequence CTCN PAM
uuccucuccaggugggcaug

SEQ ID NO: 27170 - RNA, 20 nt, Artificial Sequence
  spacer sequence CTCN PAM
ccaggugggcaugacggcuc

SEQ ID NO: 27171 - RNA, 20 nt, Artificial Sequence
  spacer sequence CTCN PAM
aggugggcaugacggcuccc

SEQ ID NO: 27172 - RNA, 20 nt, Artificial Sequence
  spacer sequence CTCN PAM
cgggacccggcggcacaucu

SEQ ID NO: 27173 - RNA, 20 nt, Artificial Sequence
  spacer sequence CTCN PAM
uccaugucccugcagauggg

SEQ ID NO: 27174 - RNA, 20 nt, Artificial Sequence
  spacer sequence CTCN PAM
augucccugcagaugggcua

SEQ ID NO: 27175 - RNA, 20 nt, Artificial Sequence
  spacer sequence CTCN PAM
gguuggcgcccugcguguag

SEQ ID NO: 27176 - RNA, 20 nt, Artificial Sequence
  spacer sequence CTCN PAM
cucgggcaccggcgacugcc

SEQ ID NO: 27177 - RNA, 20 nt, Artificial Sequence
  spacer sequence CTCN PAM
ggcaccggcgacugcccgga

SEQ ID NO: 27178 - RNA, 20 nt, Artificial Sequence
  spacer sequence CTCN PAM
cccggguccgggcagucgcc

SEQ ID NO: 27179 - RNA, 20 nt, Artificial Sequence
  spacer sequence CTCN PAM
ugguaguaagggggauauuc

SEQ ID NO: 27180 - RNA, 20 nt, Artificial Sequence
  spacer sequence CTCN PAM
uccugguaguaagggggaua

SEQ ID NO: 27181 - RNA, 20 nt, Artificial Sequence
  spacer sequence CTCN PAM
guagccggccuccuccuggu

SEQ ID NO: 27182 - RNA, 20 nt, Artificial Sequence
  spacer sequence CTCN PAM
cagcacgcucucuccccaca

SEQ ID NO: 27183 - RNA, 20 nt, Artificial Sequence
  spacer sequence CTCN PAM
cuccccacaucgucugccca

SEQ ID NO: 27184 - RNA, 20 nt, Artificial Sequence
  spacer sequence CTCN PAM
ccccacaucgucugcccauc

SEQ ID NO: 27185 - RNA, 20 nt, Artificial Sequence
  spacer sequence CTCN PAM
ccacaucgucugcccaucug

SEQ ID NO: 27186 - RNA, 20 nt, Artificial Sequence
  spacer sequence CTCN PAM
cagacccuugguugacuggc

SEQ ID NO: 27187 - RNA, 20 nt, Artificial Sequence
  spacer sequence CTCN PAM
gcugccugaucccacgcuga

SEQ ID NO: 27188 - RNA, 20 nt, Artificial Sequence
  spacer sequence CTCN PAM
gccuugcgaaggaucaaggc

SEQ ID NO: 27189 - RNA, 20 nt, Artificial Sequence
  spacer sequence CTCN PAM
cccuacacguauugggauau

SEQ ID NO: 27190 - RNA, 20 nt, Artificial Sequence
  spacer sequence CTCN PAM
ucuucccagcacagccugaa

SEQ ID NO: 27191 - RNA, 20 nt, Artificial Sequence
  spacer sequence CTCN PAM
ccucuucccccuuuugucag

SEQ ID NO: 27192 - RNA, 20 nt, Artificial Sequence
  spacer sequence CTCN PAM
ucccccuuuugucagcugag

SEQ ID NO: 27193 - RNA, 20 nt, Artificial Sequence
  spacer sequence CTCN PAM
gcugacaaaagggggaagag

SEQ ID NO: 27194 - RNA, 20 nt, Artificial Sequence
  spacer sequence CTCN PAM
acuguccuugccccaccccu

SEQ ID NO: 27195 - RNA, 20 nt, Artificial Sequence
  spacer sequence CTCN PAM
ccacuguccuugccccaccc

SEQ ID NO: 27196 - RNA, 20 nt, Artificial Sequence
  spacer sequence CTCN PAM
cuccacuguccuugccccac

SEQ ID NO: 27197 - RNA, 20 nt, Artificial Sequence
  spacer sequence CTCN PAM
uuuccuagcacucucuccac

SEQ ID NO: 27198 - RNA, 20 nt, Artificial Sequence
  spacer sequence CTCN PAM
ggcucccaagugacuggauu

SEQ ID NO: 27199 - RNA, 20 nt, Artificial Sequence
  spacer sequence CTCN PAM
caagugacuggauuugccua

SEQ ID NO: 27200 - RNA, 20 nt, Artificial Sequence
  spacer sequence CTCN PAM
gaccugccccggggccaggu

SEQ ID NO: 27201 - RNA, 20 nt, Artificial Sequence
  spacer sequence CTCN PAM
accuggccccggggcagguc

SEQ ID NO: 27202 - RNA, 20 nt, Artificial Sequence
  spacer sequence CTCN PAM
cuuucuccaccuggccccgg

SEQ ID NO: 27203 - RNA, 20 nt, Artificial Sequence
  spacer sequence CTCN PAM
gaauuucacuuccuuguacg

SEQ ID NO: 27204 - RNA, 20 nt, Artificial Sequence
  spacer sequence CTCN PAM
ccaugcuccccgccccaacc

SEQ ID NO: 27205 - RNA, 20 nt, Artificial Sequence
  spacer sequence CTCN PAM
augcuccccgccccaaccca

SEQ ID NO: 27206 - RNA, 20 nt, Artificial Sequence
  spacer sequence CTCN PAM
ccgccccaacccacucuggc

SEQ ID NO: 27207 - RNA, 20 nt, Artificial Sequence
  spacer sequence CTCN PAM
ggccucaguagauuuuuuuu

SEQ ID NO: 27208 - RNA, 20 nt, Artificial Sequence
  spacer sequence CTCN PAM
guagauuuuuuuuucaguug

SEQ ID NO: 27209 - RNA, 20 nt, Artificial Sequence
  spacer sequence CTCN PAM
agccugggcaacaaccacaa

SEQ ID NO: 27210 - RNA, 20 nt, Artificial Sequence
  spacer sequence CTCN PAM
cugcaccuccaccuuccggg

SEQ ID NO: 27211 - RNA, 20 nt, Artificial Sequence
  spacer sequence CTCN PAM
accuuccgggcucaagcgau

SEQ ID NO: 27212 - RNA, 20 nt, Artificial Sequence
  spacer sequence CTCN PAM
agcgauucuccagccucagc

SEQ ID NO: 27213 - RNA, 20 nt, Artificial Sequence
  spacer sequence CTCN PAM
agccucagccuccugaguag

SEQ ID NO: 27214 - RNA, 20 nt, Artificial Sequence
  spacer sequence CTCN PAM
gccuccugaguagcuaggac

SEQ ID NO: 27215 - RNA, 20 nt, Artificial Sequence
  spacer sequence CTCN PAM
ugaguagcuaggacugcagg

SEQ ID NO: 27216 - RNA, 20 nt, Artificial Sequence
  spacer sequence CTCN PAM
ggaggcugaggcuggagaau

SEQ ID NO: 27217 - RNA, 20 nt, Artificial Sequence
  spacer sequence CTCN PAM
accacgcccggcuaauuuuu

SEQ ID NO: 27218 - RNA, 20 nt, Artificial Sequence
  spacer sequence CTCN PAM
acuaaaaauacaaaaauuag

SEQ ID NO: 27219 - RNA, 20 nt, Artificial Sequence
  spacer sequence CTCN PAM
aacuccuggccucaggugug

SEQ ID NO: 27220 - RNA, 20 nt, Artificial Sequence
  spacer sequence CTCN PAM
uggccucaggugugauccgc

SEQ ID NO: 27221 - RNA, 20 nt, Artificial Sequence
  spacer sequence CTCN PAM
ggugugauccgcccgccucc

SEQ ID NO: 27222 - RNA, 20 nt, Artificial Sequence
  spacer sequence CTCN PAM
gccuccccaagcgcugagau

SEQ ID NO: 27223 - RNA, 20 nt, Artificial Sequence
  spacer sequence CTCN PAM
ccaagcgcugagauuacagg

SEQ ID NO: 27224 - RNA, 20 nt, Artificial Sequence
  spacer sequence CTCN PAM
gcgcuuggggaggcggaggc

SEQ ID NO: 27225 - RNA, 20 nt, Artificial Sequence
  spacer sequence CTCN PAM
caccuguaaucucagcgcuu

SEQ ID NO: 27226 - RNA, 20 nt, Artificial Sequence
  spacer sequence CTCN PAM
guagguuuuaaggagccccc

SEQ ID NO: 27227 - RNA, 20 nt, Artificial Sequence
  spacer sequence CTCN PAM
uuaaaaccuacugaggggcu

SEQ ID NO: 27228 - RNA, 20 nt, Artificial Sequence
  spacer sequence CTCN PAM
ucccuucugggcccgaccag

SEQ ID NO: 27229 - RNA, 20 nt, Artificial Sequence
  spacer sequence CTCN PAM
cuucugggcccgaccagcuu

SEQ ID NO: 27230 - RNA, 20 nt, Artificial Sequence
  spacer sequence CTCN PAM
aucuuccccggccacaugcc

SEQ ID NO: 27231 - RNA, 20 nt, Artificial Sequence
  spacer sequence CTCN PAM
gugagauaaugugaaauacg

SEQ ID NO: 27232 - RNA, 20 nt, Artificial Sequence
  spacer sequence CTCN PAM
cggagcagguccccugggug

SEQ ID NO: 27233 - RNA, 20 nt, Artificial Sequence
  spacer sequence CTCN PAM
guuuguacgaagagaaggug

SEQ ID NO: 27234 - RNA, 20 nt, Artificial Sequence
  spacer sequence CTCN PAM
ucguacaaacagagguuuua

SEQ ID NO: 27235 - RNA, 20 nt, Artificial Sequence
  spacer sequence CTCN PAM
uggccaccuucucuucguac

SEQ ID NO: 27236 - RNA, 20 nt, Artificial Sequence
  spacer sequence CTCN PAM
cuuggccaccuucucuucgu

SEQ ID NO: 27237 - RNA, 20 nt, Artificial Sequence
  spacer sequence CTCN PAM
ucgacgccaacucucuuggc

SEQ ID NO: 27238 - RNA, 20 nt, Artificial Sequence
  spacer sequence CTCN PAM
ccacaaaagcaucaaagcaa

SEQ ID NO: 27239 - RNA, 20 nt, Artificial Sequence
  spacer sequence CTCN PAM
ccccacaaaagcaucaaagc

SEQ ID NO: 27240 - RNA, 20 nt, Artificial Sequence
  spacer sequence CTCN PAM
cuccccacaaaagcaucaaa

SEQ ID NO: 27241 - RNA, 20 nt, Artificial Sequence
  spacer sequence CTCN PAM
ucucuccccacaaaagcauc

SEQ ID NO: 27242 - RNA, 20 nt, Artificial Sequence
  spacer sequence CTCN PAM
ccauugggaggaggagcaaa

SEQ ID NO: 27243 - RNA, 20 nt, Artificial Sequence
  spacer sequence CTCN PAM
caauggugagguggacauuu

SEQ ID NO: 27244 - RNA, 20 nt, Artificial Sequence
  spacer sequence CTCN PAM
ucccaauggugagguggaca

SEQ ID NO: 27245 - RNA, 20 nt, Artificial Sequence
  spacer sequence CTCN PAM
uccucccaauggugaggugg

SEQ ID NO: 27246 - RNA, 20 nt, Artificial Sequence
  spacer sequence CTCN PAM
ccuguggcuucagcuuuugc

SEQ ID NO: 27247 - RNA, 20 nt, Artificial Sequence
  spacer sequence CTCN PAM
accccaagucccggcccuuc

SEQ ID NO: 27248 - RNA, 20 nt, Artificial Sequence
  spacer sequence CTCN PAM
cucuaccccaagucccggcc

SEQ ID NO: 27249 - RNA, 20 nt, Artificial Sequence
  spacer sequence CTCN PAM
cccucuaccccaagucccgg

SEQ ID NO: 27250 - RNA, 20 nt, Artificial Sequence
  spacer sequence CTCN PAM
aaauggccaggaagcccagc

SEQ ID NO: 27251 - RNA, 20 nt, Artificial Sequence
  spacer sequence CTCN PAM
ucuccaaauggccaggaagc

SEQ ID NO: 27252 - RNA, 20 nt, Artificial Sequence
  spacer sequence CTCN PAM
aaugccccccaugcgcuuug

SEQ ID NO: 27253 - RNA, 20 nt, Artificial Sequence
  spacer sequence CTCN PAM
accuuacagcgcaagucucg

SEQ ID NO: 27254 - RNA, 20 nt, Artificial Sequence
  spacer sequence CTCN PAM
uggccucagccuggaugucu

SEQ ID NO: 27255 - RNA, 20 nt, Artificial Sequence
  spacer sequence CTCN PAM
gccuggaugucuccccguug

SEQ ID NO: 27256 - RNA, 20 nt, Artificial Sequence
  spacer sequence CTCN PAM
ccguuggcgaacuccuauuu

SEQ ID NO: 27257 - RNA, 20 nt, Artificial Sequence
  spacer sequence CTCN PAM
uauuuauccucaaagcccca

SEQ ID NO: 27258 - RNA, 20 nt, Artificial Sequence
  spacer sequence CTCN PAM
aagccccaacggcaaugcca

SEQ ID NO: 27259 - RNA, 20 nt, Artificial Sequence
  spacer sequence CTCN PAM
ugccgcgggagccgucccca

SEQ ID NO: 27260 - RNA, 20 nt, Artificial Sequence
  spacer sequence CTCN PAM
cgcggcaggagguggcauug

SEQ ID NO: 27261 - RNA, 20 nt, Artificial Sequence
  spacer sequence CTCN PAM
cacucuccccagcgccuuca

SEQ ID NO: 27262 - RNA, 20 nt, Artificial Sequence
  spacer sequence CTCN PAM
cucuccccagcgccuucaaa

SEQ ID NO: 27263 - RNA, 20 nt, Artificial Sequence
  spacer sequence CTCN PAM
ccccagcgccuucaaagcug

SEQ ID NO: 27264 - RNA, 20 nt, Artificial Sequence
  spacer sequence CTCN PAM
ccagcgccuucaaagcugug

SEQ ID NO: 27265 - RNA, 20 nt, Artificial Sequence
  spacer sequence CTCN PAM
cauuucagcuucaccuccag

SEQ ID NO: 27266 - RNA, 20 nt, Artificial Sequence
  spacer sequence CTCN PAM
agccugaagaguuuauuuca

SEQ ID NO: 27267 - RNA, 20 nt, Artificial Sequence
  spacer sequence CTCN PAM
ucaggcuggaggugaagcug

SEQ ID NO: 27268 - RNA, 20 nt, Artificial Sequence
  spacer sequence CTCN PAM
ucuuccagagugggaaacgg

SEQ ID NO: 27269 - RNA, 20 nt, Artificial Sequence
  spacer sequence CTCN PAM
ggaagaagaguugaaauaaa

SEQ ID NO: 27270 - RNA, 20 nt, Artificial Sequence
  spacer sequence CTCN PAM
aaaucaggguagccacuaua

SEQ ID NO: 27271 - RNA, 20 nt, Artificial Sequence
  spacer sequence CTCN PAM
gauuauaguggcuacccuga

SEQ ID NO: 27272 - RNA, 20 nt, Artificial Sequence
  spacer sequence CTCN PAM
agaauguuggcccccucccc

SEQ ID NO: 27273 - RNA, 20 nt, Artificial Sequence
  spacer sequence CTCN PAM
cccuccugccauccucugca

SEQ ID NO: 27274 - RNA, 20 nt, Artificial Sequence
  spacer sequence CTCN PAM
ugccauccucugcagaagcc

SEQ ID NO: 27275 - RNA, 20 nt, Artificial Sequence
  spacer sequence CTCN PAM
gcagaagccgaggagcguuc

SEQ ID NO: 27276 - RNA, 20 nt, Artificial Sequence
  spacer sequence CTCN PAM
gcuucugcagaggauggcag

SEQ ID NO: 27277 - RNA, 20 nt, Artificial Sequence
  spacer sequence CTCN PAM
ucggcuucugcagaggaugg

SEQ ID NO: 27278 - RNA, 20 nt, Artificial Sequence
  spacer sequence CTCN PAM
uccgucuguaaaguaggggu

SEQ ID NO: 27279 - RNA, 20 nt, Artificial Sequence
  spacer sequence CTCN PAM
gggacuacacucguccgucu

SEQ ID NO: 27280 - RNA, 20 nt, Artificial Sequence
  spacer sequence CTCN PAM
aguuuaguccagacucuggg

SEQ ID NO: 27281 - RNA, 20 nt, Artificial Sequence
  spacer sequence CTCN PAM
cucuaguuuaguccagacuc

SEQ ID NO: 27282 - RNA, 20 nt, Artificial Sequence
  spacer sequence CTCN PAM
guccccgcuguccccggggc

SEQ ID NO: 27283 - RNA, 20 nt, Artificial Sequence
  spacer sequence CTCN PAM
ugcaauucggagcugcggua

SEQ ID NO: 27284 - RNA, 20 nt, Artificial Sequence
  spacer sequence CTCN PAM
gaauugcaggaguucccucu

SEQ ID NO: 27285 - RNA, 20 nt, Artificial Sequence
  spacer sequence CTCN PAM
ccacguuguauaaccggcug

SEQ ID NO: 27286 - RNA, 20 nt, Artificial Sequence
  spacer sequence CTCN PAM
ccaaagacagcgcagccucg

SEQ ID NO: 27287 - RNA, 20 nt, Artificial Sequence
  spacer sequence CTCN PAM
uucccggagggcggccugcc

SEQ ID NO: 27288 - RNA, 20 nt, Artificial Sequence
  spacer sequence CTCN PAM
gggaacgaggcugcgcuguc

SEQ ID NO: 27289 - RNA, 20 nt, Artificial Sequence
  spacer sequence CTCN PAM
gccacccuacggugaugcag

SEQ ID NO: 27290 - RNA, 20 nt, Artificial Sequence
  spacer sequence CTCN PAM
ugcugcaucaccguagggug

SEQ ID NO: 27291 - RNA, 20 nt, Artificial Sequence
  spacer sequence CTCN PAM
ccuagccggguuucuuaaag

SEQ ID NO: 27292 - RNA, 20 nt, Artificial Sequence
  spacer sequence CTCN PAM
ucccuuggcccgcgcagcuc

SEQ ID NO: 27293 - RNA, 20 nt, Artificial Sequence
  spacer sequence CTCN PAM
cuuggcccgcgcagcuccga

SEQ ID NO: 27294 - RNA, 20 nt, Artificial Sequence
  spacer sequence CTCN PAM
gacggagcaggccagugagu

SEQ ID NO: 27295 - RNA, 20 nt, Artificial Sequence
  spacer sequence CTCN PAM
gucggagcugcgcgggccaa

SEQ ID NO: 27296 - RNA, 20 nt, Artificial Sequence
  spacer sequence CTCN PAM
cuggccugcuccgucggagc

SEQ ID NO: 27297 - RNA, 20 nt, Artificial Sequence
  spacer sequence CTCN PAM
gcacgcugcuauugggcgac

SEQ ID NO: 27298 - RNA, 20 nt, Artificial Sequence
  spacer sequence CTCN PAM
gcgcacuuggcuuaaggggc

SEQ ID NO: 27299 - RNA, 20 nt, Artificial Sequence
  spacer sequence CTCN PAM
cugccugcugcugggcggag

SEQ ID NO: 27300 - RNA, 20 nt, Artificial Sequence
  spacer sequence CTCN PAM
gcccagcagcaggcagggag

SEQ ID NO: 27301 - RNA, 20 nt, Artificial Sequence
  spacer sequence CTCN PAM
ugccgccuucccuccgccca

SEQ ID NO: 27302 - RNA, 20 nt, Artificial Sequence
  spacer sequence CTCN PAM
gcagcucuugccgccuuccc

SEQ ID NO: 27303 - RNA, 20 nt, Artificial Sequence
  spacer sequence CTCN PAM
ccuuccaggggcuccgcagc

SEQ ID NO: 27304 - RNA, 20 nt, Artificial Sequence
  spacer sequence CTCN PAM
gagagggaagaaggcccgag

SEQ ID NO: 27305 - RNA, 20 nt, Artificial Sequence
  spacer sequence CTCN PAM
gaguccuucucaccuuccag

SEQ ID NO: 27306 - RNA, 20 nt, Artificial Sequence
  spacer sequence CTCN PAM
ccgaguccuucucaccuucc

SEQ ID NO: 27307 - RNA, 20 nt, Artificial Sequence
  spacer sequence CTCN PAM
ggccuucuucccucuccgag

SEQ ID NO: 27308 - RNA, 20 nt, Artificial Sequence
  spacer sequence CTCN PAM
agaaugcgggguuggggccg

SEQ ID NO: 27309 - RNA, 20 nt, Artificial Sequence
  spacer sequence CTCN PAM
agucucgggccuucuucccu

SEQ ID NO: 27310 - RNA, 20 nt, Artificial Sequence
  spacer sequence CTCN PAM
cggccccaaccccgcauucu

SEQ ID NO: 27311 - RNA, 20 nt, Artificial Sequence
  spacer sequence CTCN PAM
gaccuccuuccggugaaugu

SEQ ID NO: 27312 - RNA, 20 nt, Artificial Sequence
  spacer sequence CTCN PAM
uuccggugaauguugacgac

SEQ ID NO: 27313 - RNA, 20 nt, Artificial Sequence
  spacer sequence CTCN PAM
aggggggcaucggacaucug

SEQ ID NO: 27314 - RNA, 20 nt, Artificial Sequence
  spacer sequence CTCN PAM
uaagggucccagauguccga

SEQ ID NO: 27315 - RNA, 20 nt, Artificial Sequence
  spacer sequence CTCN PAM
ugcacucccccuugccccgu

SEQ ID NO: 27316 - RNA, 20 nt, Artificial Sequence
  spacer sequence CTCN PAM
cccuugccccgucuuacaaa

SEQ ID NO: 27317 - RNA, 20 nt, Artificial Sequence
  spacer sequence CTCN PAM
auuuguaagacggggcaagg

SEQ ID NO: 27318 - RNA, 20 nt, Artificial Sequence
  spacer sequence CTCN PAM
guuucuccauuuguaagacg

SEQ ID NO: 27319 - RNA, 20 nt, Artificial Sequence
  spacer sequence CTCN PAM
cccagauccuaagucccgcu

SEQ ID NO: 27320 - RNA, 20 nt, Artificial Sequence
  spacer sequence CTCN PAM
gacccagacccuuacgccag

SEQ ID NO: 27321 - RNA, 20 nt, Artificial Sequence
  spacer sequence CTCN PAM
gucagcgucagauucuccau

SEQ ID NO: 27322 - RNA, 20 nt, Artificial Sequence
  spacer sequence CTCN PAM
aucugugucagagguggacc

SEQ ID NO: 27323 - RNA, 20 nt, Artificial Sequence
  spacer sequence CTCN PAM
gacacagauggagaaucuga

SEQ ID NO: 27324 - RNA, 20 nt, Artificial Sequence
  spacer sequence CTCN PAM
aggagucucuaucccagccc

SEQ ID NO: 27325 - RNA, 20 nt, Artificial Sequence
  spacer sequence CTCN PAM
uggagucagcgauuccugau

SEQ ID NO: 27326 - RNA, 20 nt, Artificial Sequence
  spacer sequence CTCN PAM
aucccagccccuucgccuga

SEQ ID NO: 27327 - RNA, 20 nt, Artificial Sequence
  spacer sequence CTCN PAM
uucucuggcucccgcggucc

SEQ ID NO: 27328 - RNA, 20 nt, Artificial Sequence
  spacer sequence CTCN PAM
ggcucccgcggucccucuga

SEQ ID NO: 27329 - RNA, 20 nt, Artificial Sequence
  spacer sequence CTCN PAM
cgcggucccucugagcgauu

SEQ ID NO: 27330 - RNA, 20 nt, Artificial Sequence
  spacer sequence CTCN PAM
gagcgauuaaugcuacauaa

SEQ ID NO: 27331 - RNA, 20 nt, Artificial Sequence
  spacer sequence CTCN PAM
gagggaccgcgggagccaga

SEQ ID NO: 27332 - RNA, 20 nt, Artificial Sequence
  spacer sequence CTCN PAM
gcccacaccuuauguagcau

SEQ ID NO: 27333 - RNA, 20 nt, Artificial Sequence
  spacer sequence CTCN PAM
agcugggcaacugccugucu

SEQ ID NO: 27334 - RNA, 20 nt, Artificial Sequence
  spacer sequence CTCN PAM
cugggugccuggguuugcuu

SEQ ID NO: 27335 - RNA, 20 nt, Artificial Sequence
  spacer sequence CTCN PAM
gggugccuggguuugcuuuc

SEQ ID NO: 27336 - RNA, 20 nt, Artificial Sequence
  spacer sequence CTCN PAM
guuuccacuucuguagagug

SEQ ID NO: 27337 - RNA, 20 nt, Artificial Sequence
  spacer sequence CTCN PAM
acagaaguggaaaccgaggc

SEQ ID NO: 27338 - RNA, 20 nt, Artificial Sequence
  spacer sequence CTCN PAM
gaagauaacagcaacgaaua

SEQ ID NO: 27339 - RNA, 20 nt, Artificial Sequence
  spacer sequence CTCN PAM
cuguucuccgaagauaacag

SEQ ID NO: 27340 - RNA, 20 nt, Artificial Sequence
  spacer sequence CTCN PAM
ugccuggcccagcccaggca

SEQ ID NO: 27341 - RNA, 20 nt, Artificial Sequence
  spacer sequence CTCN PAM
uccagguccugacccccagc

SEQ ID NO: 27342 - RNA, 20 nt, Artificial Sequence
  spacer sequence CTCN PAM
ccuggaagccucuuccaggu

SEQ ID NO: 27343 - RNA, 20 nt, Artificial Sequence
  spacer sequence CTCN PAM
accccaagccucaccuggaa

SEQ ID NO: 27344 - RNA, 20 nt, Artificial Sequence
  spacer sequence CTCN PAM
gucccuggaggauuagagga

SEQ ID NO: 27345 - RNA, 20 nt, Artificial Sequence
  spacer sequence CTCN PAM
agggaccgaguuugggcuua

SEQ ID NO: 27346 - RNA, 20 nt, Artificial Sequence
  spacer sequence CTCN PAM
aauccuccagggaccgaguu

SEQ ID NO: 27347 - RNA, 20 nt, Artificial Sequence
  spacer sequence CTCN PAM
gagcgacaguccuggcagcc

SEQ ID NO: 27348 - RNA, 20 nt, Artificial Sequence
  spacer sequence CTCN PAM
gagcagggcugacagcuggg

SEQ ID NO: 27349 - RNA, 20 nt, Artificial Sequence
  spacer sequence CTCN PAM
caucugauuggcugccagga

SEQ ID NO: 27350 - RNA, 20 nt, Artificial Sequence
  spacer sequence CTCN PAM
cauugguuuacuccaccccu

SEQ ID NO: 27351 - RNA, 20 nt, Artificial Sequence
  spacer sequence CTCN PAM
accccugggguagcggagcc

SEQ ID NO: 27352 - RNA, 20 nt, Artificial Sequence
  spacer sequence CTCN PAM
gcuaccccagggguggagua

SEQ ID NO: 27353 - RNA, 20 nt, Artificial Sequence
  spacer sequence CTCN PAM
uuaucgagugacuacuguuu

SEQ ID NO: 27354 - RNA, 20 nt, Artificial Sequence
  spacer sequence CTCN PAM
auaaagaggcuccgcuaccc

SEQ ID NO: 27355 - RNA, 20 nt, Artificial Sequence
  spacer sequence CTCN PAM
cucuaaucagagcuuccagg

SEQ ID NO: 27356 - RNA, 20 nt, Artificial Sequence
  spacer sequence CTCN PAM
aaucagagcuuccaggaacc

SEQ ID NO: 27357 - RNA, 20 nt, Artificial Sequence
  spacer sequence CTCN PAM
gauuagagcgaggcaaacag

SEQ ID NO: 27358 - RNA, 20 nt, Artificial Sequence
  spacer sequence CTCN PAM
uuccuuuaucccacagcgca

SEQ ID NO: 27359 - RNA, 20 nt, Artificial Sequence
  spacer sequence CTCN PAM
cugccccuuucugaaccuca

SEQ ID NO: 27360 - RNA, 20 nt, Artificial Sequence
  spacer sequence CTCN PAM
cugucccguccccugcccag

SEQ ID NO: 27361 - RNA, 20 nt, Artificial Sequence
  spacer sequence CTCN PAM
gucccguccccugcccaguc

SEQ ID NO: 27362 - RNA, 20 nt, Artificial Sequence
  spacer sequence CTCN PAM
ccauggccuucuggacacag

SEQ ID NO: 27363 - RNA, 20 nt, Artificial Sequence
  spacer sequence CTCN PAM
ggaagaauuucauguaucgc

SEQ ID NO: 27364 - RNA, 20 nt, Artificial Sequence
  spacer sequence CTCN PAM
ggcgauacaugaaauucuuc

SEQ ID NO: 27365 - RNA, 20 nt, Artificial Sequence
  spacer sequence CTCN PAM
cacuggggcguuaccggcug

SEQ ID NO: 27366 - RNA, 20 nt, Artificial Sequence
  spacer sequence CTCN PAM
caccuauucucccccagguc

SEQ ID NO: 27367 - RNA, 20 nt, Artificial Sequence
  spacer sequence CTCN PAM
cccagguccagcuccugguc

SEQ ID NO: 27368 - RNA, 20 nt, Artificial Sequence
  spacer sequence CTCN PAM
uggucgaauugcuguggccu

SEQ ID NO: 27369 - RNA, 20 nt, Artificial Sequence
  spacer sequence CTCN PAM
cuuccucuucuucauccugg

SEQ ID NO: 27370 - RNA, 20 nt, Artificial Sequence
  spacer sequence CTCN PAM
uccucuucuucauccuggug

SEQ ID NO: 27371 - RNA, 20 nt, Artificial Sequence
  spacer sequence CTCN PAM
ucuucauccugguggcuguu

SEQ ID NO: 27372 - RNA, 20 nt, Artificial Sequence
  spacer sequence CTCN PAM
cacccgccccuggagcacca

SEQ ID NO: 27373 - RNA, 20 nt, Artificial Sequence
  spacer sequence CTCN PAM
aggggcgggugggaguggcg

SEQ ID NO: 27374 - RNA, 20 nt, Artificial Sequence
  spacer sequence CTCN PAM
cauucauggugcuccagggg

SEQ ID NO: 27375 - RNA, 20 nt, Artificial Sequence
  spacer sequence CTCN PAM
cccgugcacaggaauccccc

SEQ ID NO: 27376 - RNA, 20 nt, Artificial Sequence
  spacer sequence CTCN PAM
cugacaugcacgggggauuc

SEQ ID NO: 27377 - RNA, 20 nt, Artificial Sequence
  spacer sequence CTCN PAM
caugccauguauuggcggcc

SEQ ID NO: 27378 - RNA, 20 nt, Artificial Sequence
  spacer sequence CTCN PAM
cucccaugccauguauuggc

SEQ ID NO: 27379 - RNA, 20 nt, Artificial Sequence
  spacer sequence CTCN PAM
ccaucgcuggaggcaugcaa

SEQ ID NO: 27380 - RNA, 20 nt, Artificial Sequence
  spacer sequence CTCN PAM
aucgcuggaggcaugcaagc

SEQ ID NO: 27381 - RNA, 20 nt, Artificial Sequence
  spacer sequence CTCN PAM
agcgauggagagcucacucc

SEQ ID NO: 27382 - RNA, 20 nt, Artificial Sequence
  spacer sequence CTCN PAM
acccccaucgggucgcccgg

SEQ ID NO: 27383 - RNA, 20 nt, Artificial Sequence
  spacer sequence CTCN PAM
gccugacuccacccccaucg

SEQ ID NO: 27384 - RNA, 20 nt, Artificial Sequence
  spacer sequence CTCN PAM
gcaccaggcgucuccccgca

SEQ ID NO: 27385 - RNA, 20 nt, Artificial Sequence
  spacer sequence CTCN PAM
ccgcaggccacuucccaaac

SEQ ID NO: 27386 - RNA, 20 nt, Artificial Sequence
  spacer sequence CTCN PAM
agggucucaucuguaaugug

SEQ ID NO: 27387 - RNA, 20 nt, Artificial Sequence
  spacer sequence CTCN PAM
ucuguaaugugaacaacacc

SEQ ID NO: 27388 - RNA, 20 nt, Artificial Sequence
  spacer sequence CTCN PAM
cccggugucagcugcggaaa

SEQ ID NO: 27389 - RNA, 20 nt, Artificial Sequence
  spacer sequence CTCN PAM
ucgcccggugucagcugcgg

SEQ ID NO: 27390 - RNA, 20 nt, Artificial Sequence
  spacer sequence CTCN PAM
ggcgcccgggcuccucgccc

SEQ ID NO: 27391 - RNA, 20 nt, Artificial Sequence
  spacer sequence CTCN PAM
cugugagccagaggcagugg

SEQ ID NO: 27392 - RNA, 20 nt, Artificial Sequence
  spacer sequence CTCN PAM
cagggagucguugaaguugc

SEQ ID NO: 27393 - RNA, 20 nt, Artificial Sequence
  spacer sequence CTCN PAM
ggcucacagggagucguuga

SEQ ID NO: 27394 - RNA, 20 nt, Artificial Sequence
  spacer sequence CTCN PAM
gggcugcagugccggccgga

SEQ ID NO: 27395 - RNA, 20 nt, Artificial Sequence
  spacer sequence CTCN PAM
ugcccucucucuguccccag

SEQ ID NO: 27396 - RNA, 20 nt, Artificial Sequence
  spacer sequence CTCN PAM
cucuguccccagggucuccc

SEQ ID NO: 27397 - RNA, 20 nt, Artificial Sequence
  spacer sequence CTCN PAM
cuguccccagggucucccgg

SEQ ID NO: 27398 - RNA, 20 nt, Artificial Sequence
  spacer sequence CTCN PAM
guccccagggucucccggcu

SEQ ID NO: 27399 - RNA, 20 nt, Artificial Sequence
  spacer sequence CTCN PAM
cggcugcuagccgaugcccg

SEQ ID NO: 27400 - RNA, 20 nt, Artificial Sequence
  spacer sequence CTCN PAM
cagcacagugcgggcaucgg

SEQ ID NO: 27401 - RNA, 20 nt, Artificial Sequence
  spacer sequence CTCN PAM
gcguggcgaucagcuucccu

SEQ ID NO: 27402 - RNA, 20 nt, Artificial Sequence
  spacer sequence CTCN PAM
cccgugcugcgugcagcccu

SEQ ID NO: 27403 - RNA, 20 nt, Artificial Sequence
  spacer sequence CTCN PAM
ucacccgugcugcgugcagc

SEQ ID NO: 27404 - RNA, 20 nt, Artificial Sequence
  spacer sequence CTCN PAM
ggcagggcugagcucugagc

SEQ ID NO: 27405 - RNA, 20 nt, Artificial Sequence
  spacer sequence CTCN PAM
gcccugccagaggccccccg

SEQ ID NO: 27406 - RNA, 20 nt, Artificial Sequence
  spacer sequence CTCN PAM
gagccucaacuugccgggcc

SEQ ID NO: 27407 - RNA, 20 nt, Artificial Sequence
  spacer sequence CTCN PAM
gagcucagcccugccagagg

SEQ ID NO: 27408 - RNA, 20 nt, Artificial Sequence
  spacer sequence CTCN PAM
acuugccgggccgugaaaug

SEQ ID NO: 27409 - RNA, 20 nt, Artificial Sequence
  spacer sequence CTCN PAM
gaccaacguccccccagccc

SEQ ID NO: 27410 - RNA, 20 nt, Artificial Sequence
  spacer sequence CTCN PAM
cgugcgcuccucccccagcc

SEQ ID NO: 27411 - RNA, 20 nt, Artificial Sequence
  spacer sequence CTCN PAM
ucccccagcccagccucaac

SEQ ID NO: 27412 - RNA, 20 nt, Artificial Sequence
  spacer sequence CTCN PAM
cccagcccagccucaaccaa

SEQ ID NO: 27413 - RNA, 20 nt, Artificial Sequence
  spacer sequence CTCN PAM
accaaccaagcagucuccac

SEQ ID NO: 27414 - RNA, 20 nt, Artificial Sequence
  spacer sequence CTCN PAM
acuggaaccacccaugcugg

SEQ ID NO: 27415 - RNA, 20 nt, Artificial Sequence
  spacer sequence CTCN PAM
gcgacauccagcaugggugg

SEQ ID NO: 27416 - RNA, 20 nt, Artificial Sequence
  spacer sequence CTCN PAM
cguuccaggcauccaggcug

SEQ ID NO: 27417 - RNA, 20 nt, Artificial Sequence
  spacer sequence CTCN PAM
gcggugaugcugcuuguccg

SEQ ID NO: 27418 - RNA, 20 nt, Artificial Sequence
  spacer sequence CTCN PAM
gucugggggcccagacggac

SEQ ID NO: 27419 - RNA, 20 nt, Artificial Sequence
  spacer sequence CTCN PAM
cugggucagacacacucugu

SEQ ID NO: 27420 - RNA, 20 nt, Artificial Sequence
  spacer sequence CTCN PAM
ucugugagaucuccaaugag

SEQ ID NO: 27421 - RNA, 20 nt, Artificial Sequence
  spacer sequence CTCN PAM
cagacgagucuuccucacug

SEQ ID NO: 27422 - RNA, 20 nt, Artificial Sequence
  spacer sequence CTCN PAM
aaugagucccuuugccucuc

SEQ ID NO: 27423 - RNA, 20 nt, Artificial Sequence
  spacer sequence CTCN PAM
uuggagaucucacagacgag

SEQ ID NO: 27424 - RNA, 20 nt, Artificial Sequence
  spacer sequence CTCN PAM
cagagccucaguuucccuau

SEQ ID NO: 27425 - RNA, 20 nt, Artificial Sequence
  spacer sequence CTCN PAM
gagccucaguuucccuauuu

SEQ ID NO: 27426 - RNA, 20 nt, Artificial Sequence
  spacer sequence CTCN PAM
gagaggcaaagggacucauu

SEQ ID NO: 27427 - RNA, 20 nt, Artificial Sequence
  spacer sequence CTCN PAM
guuucccuauuuguaaagug

SEQ ID NO: 27428 - RNA, 20 nt, Artificial Sequence
  spacer sequence CTCN PAM
ggccaguucccaggcagacc

SEQ ID NO: 27429 - RNA, 20 nt, Artificial Sequence
  spacer sequence CTCN PAM
cuagggguccagcgcucugg

SEQ ID NO: 27430 - RNA, 20 nt, Artificial Sequence
  spacer sequence CTCN PAM
ccaggaaucccugggguugg

SEQ ID NO: 27431 - RNA, 20 nt, Artificial Sequence
  spacer sequence CTCN PAM
ugggcuuggcccagugccaa

SEQ ID NO: 27432 - RNA, 20 nt, Artificial Sequence
  spacer sequence CTCN PAM
aacaagcugugcaagggcuc

SEQ ID NO: 27433 - RNA, 20 nt, Artificial Sequence
  spacer sequence CTCN PAM
gcggccuccaacaagcugug

SEQ ID NO: 27434 - RNA, 20 nt, Artificial Sequence
  spacer sequence CTCN PAM
ugggccagguccucagcggc

SEQ ID NO: 27435 - RNA, 20 nt, Artificial Sequence
  spacer sequence CTCN PAM
uaccuccugggccagguccu

SEQ ID NO: 27436 - RNA, 20 nt, Artificial Sequence
  spacer sequence CTCN PAM
uccucaacccccauggaggc

SEQ ID NO: 27437 - RNA, 20 nt, Artificial Sequence
  spacer sequence CTCN PAM
acccccauggaggcaacguu

SEQ ID NO: 27438 - RNA, 20 nt, Artificial Sequence
  spacer sequence CTCN PAM
auggggguugaggaugagug

SEQ ID NO: 27439 - RNA, 20 nt, Artificial Sequence
  spacer sequence CTCN PAM
cggcgcaggcugccugccaa

SEQ ID NO: 27440 - RNA, 20 nt, Artificial Sequence
  spacer sequence CTCN PAM
ugaaaacccacccaagggaa

SEQ ID NO: 27441 - RNA, 20 nt, Artificial Sequence
  spacer sequence CTCN PAM
cugucuaauccuccugaaaa

SEQ ID NO: 27442 - RNA, 20 nt, Artificial Sequence
  spacer sequence CTCN PAM
cgcugucuaauccuccugaa

SEQ ID NO: 27443 - RNA, 20 nt, Artificial Sequence
  spacer sequence CTCN PAM
cucucgcugucuaauccucc

SEQ ID NO: 27444 - RNA, 20 nt, Artificial Sequence
  spacer sequence CTCN PAM
cccucucgcugucuaauccu

SEQ ID NO: 27445 - RNA, 20 nt, Artificial Sequence
  spacer sequence CTCN PAM
aagcccuaaccagggcaggg

SEQ ID NO: 27446 - RNA, 20 nt, Artificial Sequence
  spacer sequence CTCN PAM
gucugguaaccucucucuag

SEQ ID NO: 27447 - RNA, 20 nt, Artificial Sequence
  spacer sequence CTCN PAM
cucuagcuccuggcgcugcg

SEQ ID NO: 27448 - RNA, 20 nt, Artificial Sequence
  spacer sequence CTCN PAM
cuagcuccuggcgcugcgca

SEQ ID NO: 27449 - RNA, 20 nt, Artificial Sequence
  spacer sequence CTCN PAM
agcuccuggcgcugcgcagc

SEQ ID NO: 27450 - RNA, 20 nt, Artificial Sequence
  spacer sequence CTCN PAM
uggcgcugcgcagccuggug

SEQ ID NO: 27451 - RNA, 20 nt, Artificial Sequence
  spacer sequence CTCN PAM
accaggcugcgcagcgccag

SEQ ID NO: 27452 - RNA, 20 nt, Artificial Sequence
  spacer sequence CTCN PAM
gcagcagugcccgaagcucc

SEQ ID NO: 27453 - RNA, 20 nt, Artificial Sequence
  spacer sequence CTCN PAM
gggucucugcagcagugccc

SEQ ID NO: 27454 - RNA, 20 nt, Artificial Sequence
  spacer sequence CTCN PAM
agggggccgcuggucccucg

SEQ ID NO: 27455 - RNA, 20 nt, Artificial Sequence
  spacer sequence CTCN PAM
gacagcaacuccagggggcc

SEQ ID NO: 27456 - RNA, 20 nt, Artificial Sequence
  spacer sequence CTCN PAM
gcagugucaggggaccuagc

SEQ ID NO: 27457 - RNA, 20 nt, Artificial Sequence
  spacer sequence CTCN PAM
cucaacugguacgaggcuag

SEQ ID NO: 27458 - RNA, 20 nt, Artificial Sequence
  spacer sequence CTCN PAM
acugguacgaggcuagugac

SEQ ID NO: 27459 - RNA, 20 nt, Artificial Sequence
  spacer sequence CTCN PAM
uaccaguugagggaggggcc

SEQ ID NO: 27460 - RNA, 20 nt, Artificial Sequence
  spacer sequence CTCN PAM
aucaggucacuagccucgua

SEQ ID NO: 27461 - RNA, 20 nt, Artificial Sequence
  spacer sequence CTCN PAM
ugccccaccagcuccaucag

SEQ ID NO: 27462 - RNA, 20 nt, Artificial Sequence
  spacer sequence CTCN PAM
ggcugcugucuggcagggcg

SEQ ID NO: 27463 - RNA, 20 nt, Artificial Sequence
  spacer sequence CTCN PAM
cucaggcugcugucuggcag

SEQ ID NO: 27464 - RNA, 20 nt, Artificial Sequence
  spacer sequence CTCN PAM
guuuccccucuugggaagug

SEQ ID NO: 27465 - RNA, 20 nt, Artificial Sequence
  spacer sequence CTCN PAM
ugggaaguggaacucugggc

SEQ ID NO: 27466 - RNA, 20 nt, Artificial Sequence
  spacer sequence CTCN PAM
gggcaggggggcagggccuc

SEQ ID NO: 27467 - RNA, 20 nt, Artificial Sequence
  spacer sequence CTCN PAM
uggcacccccaucccaggcc

SEQ ID NO: 27468 - RNA, 20 nt, Artificial Sequence
  spacer sequence CTCN PAM
gagcugauuggagcccugga

SEQ ID NO: 27469 - RNA, 20 nt, Artificial Sequence
  spacer sequence CTCN PAM
gagcaggcggggccugggau

SEQ ID NO: 27470 - RNA, 20 nt, Artificial Sequence
  spacer sequence CTCN PAM
aaucagcuccgagcaggcgg

SEQ ID NO: 27471 - RNA, 20 nt, Artificial Sequence
  spacer sequence CTCN PAM
ggagacgccugaagccucug

SEQ ID NO: 27472 - RNA, 20 nt, Artificial Sequence
  spacer sequence CTCN PAM
agagcaggcgggacagcggg

SEQ ID NO: 27473 - RNA, 20 nt, Artificial Sequence
  spacer sequence CTCN PAM
gauccucgggaagcuacucu

SEQ ID NO: 27474 - RNA, 20 nt, Artificial Sequence
  spacer sequence CTCN PAM
ggaagcuacucuuugcacca

SEQ ID NO: 27475 - RNA, 20 nt, Artificial Sequence
  spacer sequence CTCN PAM
uugcaccagauacaccuuuu

SEQ ID NO: 27476 - RNA, 20 nt, Artificial Sequence
  spacer sequence CTCN PAM
uggcccaggugggggcagcc

SEQ ID NO: 27477 - RNA, 20 nt, Artificial Sequence
  spacer sequence CTCN PAM
agacuuuacccaggccaucu

SEQ ID NO: 27478 - RNA, 20 nt, Artificial Sequence
  spacer sequence CTCN PAM
cacaauccucaagacuuuac

SEQ ID NO: 27479 - RNA, 20 nt, Artificial Sequence
  spacer sequence CTCN PAM
aaaagcaaggaggucagggu

SEQ ID NO: 27480 - RNA, 20 nt, Artificial Sequence
  spacer sequence CTCN PAM
uugcuuuuugaguaggaagg

SEQ ID NO: 27481 - RNA, 20 nt, Artificial Sequence
  spacer sequence CTCN PAM
gcccuguucccacccugacc

SEQ ID NO: 27482 - RNA, 20 nt, Artificial Sequence
  spacer sequence CTCN PAM
uuaggcugauaaagguaacu

SEQ ID NO: 27483 - RNA, 20 nt, Artificial Sequence
  spacer sequence CTCN PAM
aaugcaguguaacuacuugg

SEQ ID NO: 27484 - RNA, 20 nt, Artificial Sequence
  spacer sequence CTCN PAM
ucuuucuggccuuccagcag

SEQ ID NO: 27485 - RNA, 20 nt, Artificial Sequence
  spacer sequence CTCN PAM
gcuggaaggccagaaagaug

SEQ ID NO: 27486 - RNA, 20 nt, Artificial Sequence
  spacer sequence CTCN PAM
ccugcuguugcuacuacugu

SEQ ID NO: 27487 - RNA, 20 nt, Artificial Sequence
  spacer sequence CTCN PAM
ugcuguugcuacuacuguau

SEQ ID NO: 27488 - RNA, 20 nt, Artificial Sequence
  spacer sequence CTCN PAM
cccauacaguaguagcaaca

SEQ ID NO: 27489 - RNA, 20 nt, Artificial Sequence
  spacer sequence CTCN PAM
gggccuauucuuacugaccc

SEQ ID NO: 27490 - RNA, 20 nt, Artificial Sequence
  spacer sequence CTCN PAM
gcagcauuaauguggaaggc

SEQ ID NO: 27491 - RNA, 20 nt, Artificial Sequence
  spacer sequence CTCN PAM
gcagugacucccaaggagag

SEQ ID NO: 27492 - RNA, 20 nt, Artificial Sequence
  spacer sequence CTCN PAM
caaggagaggauauggaggu

SEQ ID NO: 27493 - RNA, 20 nt, Artificial Sequence
  spacer sequence CTCN PAM
uugggagucacugcagaguu

SEQ ID NO: 27494 - RNA, 20 nt, Artificial Sequence
  spacer sequence CTCN PAM
ccuugggagucacugcagag

SEQ ID NO: 27495 - RNA, 20 nt, Artificial Sequence
  spacer sequence CTCN PAM
auauccucuccuugggaguc

SEQ ID NO: 27496 - RNA, 20 nt, Artificial Sequence
  spacer sequence CTCN PAM
gaccuccauauccucuccuu

SEQ ID NO: 27497 - RNA, 20 nt, Artificial Sequence
  spacer sequence CTCN PAM
ucuuauccugacucauauua

SEQ ID NO: 27498 - RNA, 20 nt, Artificial Sequence
  spacer sequence CTCN PAM
uauuaguagaguucuaaggc

SEQ ID NO: 27499 - RNA, 20 nt, Artificial Sequence
  spacer sequence CTCN PAM
acuaauaugagucaggauaa

SEQ ID NO: 27500 - RNA, 20 nt, Artificial Sequence
  spacer sequence CTCN PAM
caaaguacuggaauuacagg

SEQ ID NO: 27501 - RNA, 20 nt, Artificial Sequence
  spacer sequence CTCN PAM
gccucccaaaguacuggaau

SEQ ID NO: 27502 - RNA, 20 nt, Artificial Sequence
  spacer sequence CTCN PAM
ugccucggccucccaaagua

SEQ ID NO: 27503 - RNA, 20 nt, Artificial Sequence
  spacer sequence CTCN PAM
uggccacaagcaguccuccu

SEQ ID NO: 27504 - RNA, 20 nt, Artificial Sequence
  spacer sequence CTCN PAM
aacuccuggccacaagcagu

SEQ ID NO: 27505 - RNA, 20 nt, Artificial Sequence
  spacer sequence CTCN PAM
auguuucccaggcuggucuc

SEQ ID NO: 27506 - RNA, 20 nt, Artificial Sequence
  spacer sequence CTCN PAM
cuauguuucccaggcugguc

SEQ ID NO: 27507 - RNA, 20 nt, Artificial Sequence
  spacer sequence CTCN PAM
aaaaaagaaagaaagagaga

SEQ ID NO: 27508 - RNA, 20 nt, Artificial Sequence
  spacer sequence CTCN PAM
uucuuucuuuuuuagaggug

SEQ ID NO: 27509 - RNA, 20 nt, Artificial Sequence
  spacer sequence CTCN PAM
cuuucuuucuuuuuuagagg

SEQ ID NO: 27510 - RNA, 20 nt, Artificial Sequence
  spacer sequence CTCN PAM
cucuuucuuucuuuuuuaga

SEQ ID NO: 27511 - RNA, 20 nt, Artificial Sequence
  spacer sequence CTCN PAM
uucucucucuuucuuucuuu

SEQ ID NO: 27512 - RNA, 20 nt, Artificial Sequence
  spacer sequence CTCN PAM
uucucuuucucucucuuucu

SEQ ID NO: 27513 - RNA, 20 nt, Artificial Sequence
  spacer sequence CTCN PAM
cuuucucuuucucucucuuu

SEQ ID NO: 27514 - RNA, 20 nt, Artificial Sequence
  spacer sequence CTCN PAM
gccuuagaccuugacauuuu

SEQ ID NO: 27515 - RNA, 20 nt, Artificial Sequence
  spacer sequence CTCN PAM
auucccaucuucucugccuu

SEQ ID NO: 27516 - RNA, 20 nt, Artificial Sequence
  spacer sequence CTCN PAM
cagggcuucucagucugagu

SEQ ID NO: 27517 - RNA, 20 nt, Artificial Sequence
  spacer sequence CTCN PAM
gggcuucucagucugagugg

SEQ ID NO: 27518 - RNA, 20 nt, Artificial Sequence
  spacer sequence CTCN PAM
gucugagugguuacuccagu

SEQ ID NO: 27519 - RNA, 20 nt, Artificial Sequence
  spacer sequence CTCN PAM
gacugagaagcccugagagg

SEQ ID NO: 27520 - RNA, 20 nt, Artificial Sequence
  spacer sequence CTCN PAM
agugacuccuauugucccuu

SEQ ID NO: 27521 - RNA, 20 nt, Artificial Sequence
  spacer sequence CTCN PAM
uauugucccuucagcugguc

SEQ ID NO: 27522 - RNA, 20 nt, Artificial Sequence
  spacer sequence CTCN PAM
uguacccagccuccuucuuc

SEQ ID NO: 27523 - RNA, 20 nt, Artificial Sequence
  spacer sequence CTCN PAM
uucuucuucuccgugcccag

SEQ ID NO: 27524 - RNA, 20 nt, Artificial Sequence
  spacer sequence CTCN PAM
gugcccagcacagccuaugu

SEQ ID NO: 27525 - RNA, 20 nt, Artificial Sequence
  spacer sequence CTCN PAM
ccugcauaaaccucuuuauu

SEQ ID NO: 27526 - RNA, 20 nt, Artificial Sequence
  spacer sequence CTCN PAM
uuauuggcaucaauggaagc

SEQ ID NO: 27527 - RNA, 20 nt, Artificial Sequence
  spacer sequence CTCN PAM
agcacaaagguggccaugcu

SEQ ID NO: 27528 - RNA, 20 nt, Artificial Sequence
  spacer sequence CTCN PAM
ucucugaucagguggggcac

SEQ ID NO: 27529 - RNA, 20 nt, Artificial Sequence
  spacer sequence CTCN PAM
gaucagguggggcaccacga

SEQ ID NO: 27530 - RNA, 20 nt, Artificial Sequence
  spacer sequence CTCN PAM
uggugccccaccugaucaga

SEQ ID NO: 27531 - RNA, 20 nt, Artificial Sequence
  spacer sequence CTCN PAM
gccccugaccaacauccguc

SEQ ID NO: 27532 - RNA, 20 nt, Artificial Sequence
  spacer sequence CTCN PAM
cacccuugagcagaagcugc

SEQ ID NO: 27533 - RNA, 20 nt, Artificial Sequence
  spacer sequence CTCN PAM
agggugggagacggauguug

SEQ ID NO: 27534 - RNA, 20 nt, Artificial Sequence
  spacer sequence CTCN PAM
ugcagcuucugcucaagggu

SEQ ID NO: 27535 - RNA, 20 nt, Artificial Sequence
  spacer sequence CTCN PAM
ccuccugcagcuucugcuca

SEQ ID NO: 27536 - RNA, 20 nt, Artificial Sequence
  spacer sequence CTCN PAM
uugacauggugcggaaccag

SEQ ID NO: 27537 - RNA, 20 nt, Artificial Sequence
  spacer sequence CTCN PAM
aaggcaucagccauggccug

SEQ ID NO: 27538 - RNA, 20 nt, Artificial Sequence
  spacer sequence CTCN PAM
cccaagcgcucaaaggcauc

SEQ ID NO: 27539 - RNA, 20 nt, Artificial Sequence
  spacer sequence CTCN PAM
aagggugcuagcuaucugua

SEQ ID NO: 27540 - RNA, 20 nt, Artificial Sequence
  spacer sequence CTCN PAM
aggucuccaagggugcuagc

SEQ ID NO: 27541 - RNA, 20 nt, Artificial Sequence
  spacer sequence CTCN PAM
guauaauuaacucuaggucu

SEQ ID NO: 27542 - RNA, 20 nt, Artificial Sequence
  spacer sequence CTCN PAM
acucuguauaauuaacucua

SEQ ID NO: 27543 - RNA, 20 nt, Artificial Sequence
  spacer sequence CTCN PAM
cuggggggcuguuuuucucc

SEQ ID NO: 27544 - RNA, 20 nt, Artificial Sequence
  spacer sequence CTCN PAM
aacuuggcccaaccuuaggg

SEQ ID NO: 27545 - RNA, 20 nt, Artificial Sequence
  spacer sequence CTCN PAM
ugugauguaaucuaagaauu

SEQ ID NO: 27546 - RNA, 20 nt, Artificial Sequence
  spacer sequence CTCN PAM
ucuguuuucuaugccaauua

SEQ ID NO: 27547 - RNA, 20 nt, Artificial Sequence
  spacer sequence CTCN PAM
agcugaguggccuauccaau

SEQ ID NO: 27548 - RNA, 20 nt, Artificial Sequence
  spacer sequence CTCN PAM
gcuggagucuaauuggcaua

SEQ ID NO: 27549 - RNA, 20 nt, Artificial Sequence
  spacer sequence CTCN PAM
ggauucuuaagggaaaggaa

SEQ ID NO: 27550 - RNA, 20 nt, Artificial Sequence
  spacer sequence CTCN PAM
auccaugucacucuggauuc

SEQ ID NO: 27551 - RNA, 20 nt, Artificial Sequence
  spacer sequence CTCN PAM
cauggacccagucccuccuu

SEQ ID NO: 27552 - RNA, 20 nt, Artificial Sequence
  spacer sequence CTCN PAM
uggacccagucccuccuuuc

SEQ ID NO: 27553 - RNA, 20 nt, Artificial Sequence
  spacer sequence CTCN PAM
uuucuauauccacaggagac

SEQ ID NO: 27554 - RNA, 20 nt, Artificial Sequence
  spacer sequence CTCN PAM
uguggauauagaaaggaggg

SEQ ID NO: 27555 - RNA, 20 nt, Artificial Sequence
  spacer sequence CTCN PAM
ugauaguacguggguuucac

SEQ ID NO: 27556 - RNA, 20 nt, Artificial Sequence
  spacer sequence CTCN PAM
aggauucaaccauccuccac

SEQ ID NO: 27557 - RNA, 20 nt, Artificial Sequence
  spacer sequence CTCN PAM
accagcucccucccacaaca

SEQ ID NO: 27558 - RNA, 20 nt, Artificial Sequence
  spacer sequence CTCN PAM
cucccacaacacgugggaau

SEQ ID NO: 27559 - RNA, 20 nt, Artificial Sequence
  spacer sequence CTCN PAM
cacaacacgugggaauuaug

SEQ ID NO: 27560 - RNA, 20 nt, Artificial Sequence
  spacer sequence CTCN PAM
cauaauucccacguguugug

SEQ ID NO: 27561 - RNA, 20 nt, Artificial Sequence
  spacer sequence CTCN PAM
ucuuguagcucccauaauuc

SEQ ID NO: 27562 - RNA, 20 nt, Artificial Sequence
  spacer sequence CTCN PAM
guguccccacccaaaccuca

SEQ ID NO: 27563 - RNA, 20 nt, Artificial Sequence
  spacer sequence CTCN PAM
cuccuuccguuucuccccuu

SEQ ID NO: 27564 - RNA, 20 nt, Artificial Sequence
  spacer sequence CTCN PAM
ccuuccguuucuccccuugu

SEQ ID NO: 27565 - RNA, 20 nt, Artificial Sequence
  spacer sequence CTCN PAM
uuccguuucuccccuugucu

SEQ ID NO: 27566 - RNA, 20 nt, Artificial Sequence
  spacer sequence CTCN PAM
ccuugucucucucuccuccu

SEQ ID NO: 27567 - RNA, 20 nt, Artificial Sequence
  spacer sequence CTCN PAM
caccuguaaucccagcacuu

SEQ ID NO: 27568 - RNA, 20 nt, Artificial Sequence
  spacer sequence CTCN PAM
ccuugaggccaggaguuuga

SEQ ID NO: 27569 - RNA, 20 nt, Artificial Sequence
  spacer sequence CTCN PAM
aggugagaaagaaaaguuag

SEQ ID NO: 27570 - RNA, 20 nt, Artificial Sequence
  spacer sequence CTCN PAM
uggccucaaggugagaaaga

SEQ ID NO: 27571 - RNA, 20 nt, Artificial Sequence
  spacer sequence CTCN PAM
aacuccuggccucaagguga

SEQ ID NO: 27572 - RNA, 20 nt, Artificial Sequence
  spacer sequence CTCN PAM
aaaaacaacaacaacaacaa

SEQ ID NO: 27573 - RNA, 20 nt, Artificial Sequence
  spacer sequence CTCN PAM
gucucaaaaaacaacaacaa

SEQ ID NO: 27574 - RNA, 20 nt, Artificial Sequence
  spacer sequence CTCN PAM
cucuguugcccaggcuggag

SEQ ID NO: 27575 - RNA, 20 nt, Artificial Sequence
  spacer sequence CTCN PAM
guugcccaggcuggaguaca

SEQ ID NO: 27576 - RNA, 20 nt, Artificial Sequence
  spacer sequence CTCN PAM
agccugggcaacagagcgag

SEQ ID NO: 27577 - RNA, 20 nt, Artificial Sequence
  spacer sequence CTCN PAM
gcucacugcagccuccgccu

SEQ ID NO: 27578 - RNA, 20 nt, Artificial Sequence
  spacer sequence CTCN PAM
cugcagccuccgccuccugg

SEQ ID NO: 27579 - RNA, 20 nt, Artificial Sequence
  spacer sequence CTCN PAM
gccuccuggguuuaaaggau

SEQ ID NO: 27580 - RNA, 20 nt, Artificial Sequence
  spacer sequence CTCN PAM
uggguuuaaaggauucuccu

SEQ ID NO: 27581 - RNA, 20 nt, Artificial Sequence
  spacer sequence CTCN PAM
ugccuuggccucccgaguag

SEQ ID NO: 27582 - RNA, 20 nt, Artificial Sequence
  spacer sequence CTCN PAM
cgaguagcugggauuacagg

SEQ ID NO: 27583 - RNA, 20 nt, Artificial Sequence
  spacer sequence CTCN PAM
ggaggccaaggcaggagaau

SEQ ID NO: 27584 - RNA, 20 nt, Artificial Sequence
  spacer sequence CTCN PAM
cgccuguaaucccagcuacu

SEQ ID NO: 27585 - RNA, 20 nt, Artificial Sequence
  spacer sequence CTCN PAM
accaaaaauacaaaaaaauu

SEQ ID NO: 27586 - RNA, 20 nt, Artificial Sequence
  spacer sequence CTCN PAM
gaucaucugcuugccucggc

SEQ ID NO: 27587 - RNA, 20 nt, Artificial Sequence
  spacer sequence CTCN PAM
gccuuccgaagugcugagau

SEQ ID NO: 27588 - RNA, 20 nt, Artificial Sequence
  spacer sequence CTCN PAM
gcacuucggaaggccgaggc

SEQ ID NO: 27589 - RNA, 20 nt, Artificial Sequence
  spacer sequence CTCN PAM
cgccuguaaucucagcacuu

SEQ ID NO: 27590 - RNA, 20 nt, Artificial Sequence
  spacer sequence CTCN PAM
ggaggcugaggugggaagau

SEQ ID NO: 27591 - RNA, 20 nt, Artificial Sequence
  spacer sequence CTCN PAM
cgaguaacugggacuacagg

SEQ ID NO: 27592 - RNA, 20 nt, Artificial Sequence
  spacer sequence CTCN PAM
gccucccgaguaacugggac

SEQ ID NO: 27593 - RNA, 20 nt, Artificial Sequence
  spacer sequence CTCN PAM
ggcgauccuagaucuuccca

SEQ ID NO: 27594 - RNA, 20 nt, Artificial Sequence
  spacer sequence CTCN PAM
accgcugggcucaggcgauc

SEQ ID NO: 27595 - RNA, 20 nt, Artificial Sequence
  spacer sequence CTCN PAM
cugcagccucaaccgcuggg

SEQ ID NO: 27596 - RNA, 20 nt, Artificial Sequence
  spacer sequence CTCN PAM
agccugggcgacagagcaag

SEQ ID NO: 27597 - RNA, 20 nt, Artificial Sequence
  spacer sequence CTCN PAM
gucgcccaggcuagagugca

SEQ ID NO: 27598 - RNA, 20 nt, Artificial Sequence
  spacer sequence CTCN PAM
aaacaaacagaaaacaaaca

SEQ ID NO: 27599 - RNA, 20 nt, Artificial Sequence
  spacer sequence CTCN PAM
ucugguuuuuguuuguuuuc

SEQ ID NO: 27600 - RNA, 20 nt, Artificial Sequence
  spacer sequence CTCN PAM
ucuucugguuuuuguuuguu

SEQ ID NO: 27601 - RNA, 20 nt, Artificial Sequence
  spacer sequence CTCN PAM
ccucuucugguuuuuguuug

SEQ ID NO: 27602 - RNA, 20 nt, Artificial Sequence
  spacer sequence CTCN PAM
cucuccucuucugguuuuug

SEQ ID NO: 27603 - RNA, 20 nt, Artificial Sequence
  spacer sequence CTCN PAM
auccuggcugugcugucugc

SEQ ID NO: 27604 - RNA, 20 nt, Artificial Sequence
  spacer sequence CTCN PAM
ggggcugugccucaccugga

SEQ ID NO: 27605 - RNA, 20 nt, Artificial Sequence
  spacer sequence CTCN PAM
ccuggaguguuccuggcagg

SEQ ID NO: 27606 - RNA, 20 nt, Artificial Sequence
  spacer sequence CTCN PAM
aggugaggcacagccccaga

SEQ ID NO: 27607 - RNA, 20 nt, Artificial Sequence
  spacer sequence CTCN PAM
ugccccuucccugccaggaa

SEQ ID NO: 27608 - RNA, 20 nt, Artificial Sequence
  spacer sequence CTCN PAM
gacccccuccugccccuucc

SEQ ID NO: 27609 - RNA, 20 nt, Artificial Sequence
  spacer sequence CTCN PAM
agacauuuuacccugaccag

SEQ ID NO: 27610 - RNA, 20 nt, Artificial Sequence
  spacer sequence CTCN PAM
caacagucauuucccaacac

SEQ ID NO: 27611 - RNA, 20 nt, Artificial Sequence
  spacer sequence CTCN PAM
ugcuucugcccuggcuccca

SEQ ID NO: 27612 - RNA, 20 nt, Artificial Sequence
  spacer sequence CTCN PAM
cuggucucuugcuucugccc

SEQ ID NO: 27613 - RNA, 20 nt, Artificial Sequence
  spacer sequence CTCN PAM
cucccuggucucuugcuucu

SEQ ID NO: 27614 - RNA, 20 nt, Artificial Sequence
  spacer sequence CTCN PAM
aacuacgguaggggcaagca

SEQ ID NO: 27615 - RNA, 20 nt, Artificial Sequence
  spacer sequence CTCN PAM
gugcuugccccuaccguagu

SEQ ID NO: 27616 - RNA, 20 nt, Artificial Sequence
  spacer sequence CTCN PAM
ccgcucugugcuugccccua

SEQ ID NO: 27617 - RNA, 20 nt, Artificial Sequence
  spacer sequence CTCN PAM
cccuguggcacccuccccgc

SEQ ID NO: 27618 - RNA, 20 nt, Artificial Sequence
  spacer sequence CTCN PAM
uuuucucgcccuguggcacc

SEQ ID NO: 27619 - RNA, 20 nt, Artificial Sequence
  spacer sequence CTCN PAM
cucuuuuucucgcccugugg

SEQ ID NO: 27620 - RNA, 20 nt, Artificial Sequence
  spacer sequence CTCN PAM
cagggacagcuuuguucccu

SEQ ID NO: 27621 - RNA, 20 nt, Artificial Sequence
  spacer sequence CTCN PAM
uuucacugcucacagggaca

SEQ ID NO: 27622 - RNA, 20 nt, Artificial Sequence
  spacer sequence CTCN PAM
caccccucuuuucacugcuc

SEQ ID NO: 27623 - RNA, 20 nt, Artificial Sequence
  spacer sequence CTCN PAM
acccucccaccccucuuuuc

SEQ ID NO: 27624 - RNA, 20 nt, Artificial Sequence
  spacer sequence CTCN PAM
accuacacgccuccacccuc

SEQ ID NO: 27625 - RNA, 20 nt, Artificial Sequence
  spacer sequence CTCN PAM
ccucgaccuacacgccucca

SEQ ID NO: 27626 - RNA, 20 nt, Artificial Sequence
  spacer sequence CTCN PAM
ggaguucagggcaaggucug

SEQ ID NO: 27627 - RNA, 20 nt, Artificial Sequence
  spacer sequence CTCN PAM
agagcucaccucgaccuaca

SEQ ID NO: 27628 - RNA, 20 nt, Artificial Sequence
  spacer sequence CTCN PAM
aaucuucaccacguggccac

SEQ ID NO: 27629 - RNA, 20 nt, Artificial Sequence
  spacer sequence CTCN PAM
cggcucuaaucuucaccacg

SEQ ID NO: 27630 - RNA, 20 nt, Artificial Sequence
  spacer sequence CTCN PAM
caggaccugguccaggcucc

SEQ ID NO: 27631 - RNA, 20 nt, Artificial Sequence
  spacer sequence CTCN PAM
gcucccaggaccugguccag

SEQ ID NO: 27632 - RNA, 20 nt, Artificial Sequence
  spacer sequence CTCN PAM
gcucugcucccaggaccugg

SEQ ID NO: 27633 - RNA, 20 nt, Artificial Sequence
  spacer sequence CTCN PAM
uggacucugcucugcuccca

SEQ ID NO: 27634 - RNA, 20 nt, Artificial Sequence
  spacer sequence CTCN PAM
ccuggacucugcucugcucc

SEQ ID NO: 27635 - RNA, 20 nt, Artificial Sequence
  spacer sequence CTCN PAM
gggcuucugaacaccagcag

SEQ ID NO: 27636 - RNA, 20 nt, Artificial Sequence
  spacer sequence CTCN PAM
uucuccgggcuucugaacac

SEQ ID NO: 27637 - RNA, 20 nt, Artificial Sequence
  spacer sequence CTCN PAM
ccuccuucuccgggcuucug

SEQ ID NO: 27638 - RNA, 20 nt, Artificial Sequence
  spacer sequence CTCN PAM
ugcugcugccuccccuccuu

SEQ ID NO: 27639 - RNA, 20 nt, Artificial Sequence
  spacer sequence CTCN PAM
ccuccugcugcugccucccc

SEQ ID NO: 27640 - RNA, 20 nt, Artificial Sequence
  spacer sequence CTCN PAM
cuccccuccugcugcugccu

SEQ ID NO: 27641 - RNA, 20 nt, Artificial Sequence
  spacer sequence CTCN PAM
gcacagacacuggagcagcc

SEQ ID NO: 27642 - RNA, 20 nt, Artificial Sequence
  spacer sequence CTCN PAM
agugucugugcugagccucc

SEQ ID NO: 27643 - RNA, 20 nt, Artificial Sequence
  spacer sequence CTCN PAM
ggggcugcuccagugucugu

SEQ ID NO: 27644 - RNA, 20 nt, Artificial Sequence
  spacer sequence CTCN PAM
ggcagguuacucaaccucuc

SEQ ID NO: 27645 - RNA, 20 nt, Artificial Sequence
  spacer sequence CTCN PAM
accucucugugcguccccuc

SEQ ID NO: 27646 - RNA, 20 nt, Artificial Sequence
  spacer sequence CTCN PAM
cugugcguccccucuccccu

SEQ ID NO: 27647 - RNA, 20 nt, Artificial Sequence
  spacer sequence CTCN PAM
gugcguccccucuccccucc

SEQ ID NO: 27648 - RNA, 20 nt, Artificial Sequence
  spacer sequence CTCN PAM
ccccucccuuguaaaacagg

SEQ ID NO: 27649 - RNA, 20 nt, Artificial Sequence
  spacer sequence CTCN PAM
ccucccuuguaaaacaggga

SEQ ID NO: 27650 - RNA, 20 nt, Artificial Sequence
  spacer sequence CTCN PAM
cuuguaaaacagggacaaga

SEQ ID NO: 27651 - RNA, 20 nt, Artificial Sequence
  spacer sequence CTCN PAM
guguacauugcaauuauuag

SEQ ID NO: 27652 - RNA, 20 nt, Artificial Sequence
  spacer sequence CTCN PAM
ugcccuuuauccuauuuagg

SEQ ID NO: 27653 - RNA, 20 nt, Artificial Sequence
  spacer sequence CTCN PAM
uggaaaccuggugaggaagg

SEQ ID NO: 27654 - RNA, 20 nt, Artificial Sequence
  spacer sequence CTCN PAM
ccagguuuccaggagaccug

SEQ ID NO: 27655 - RNA, 20 nt, Artificial Sequence
  spacer sequence CTCN PAM
gccccuagacaccuuccuca

SEQ ID NO: 27656 - RNA, 20 nt, Artificial Sequence
  spacer sequence CTCN PAM
cuucccucugccccuagaca

SEQ ID NO: 27657 - RNA, 20 nt, Artificial Sequence
  spacer sequence CTCN PAM
ggcugacuuggcgguggcau

SEQ ID NO: 27658 - RNA, 20 nt, Artificial Sequence
  spacer sequence CTCN PAM
guccucaggcugacuuggcg

SEQ ID NO: 27659 - RNA, 20 nt, Artificial Sequence
  spacer sequence CTCN PAM
gggaagggggccagugccug

SEQ ID NO: 27660 - RNA, 20 nt, Artificial Sequence
  spacer sequence CTCN PAM
aauccguccugccaggcacu

SEQ ID NO: 27661 - RNA, 20 nt, Artificial Sequence
  spacer sequence CTCN PAM
cucaaauccguccugccagg

SEQ ID NO: 27662 - RNA, 20 nt, Artificial Sequence
  spacer sequence CTCN PAM
ucccucaaauccguccugcc

SEQ ID NO: 27663 - RNA, 20 nt, Artificial Sequence
  spacer sequence CTCN PAM
ccucccucaaauccguccug

SEQ ID NO: 27664 - RNA, 20 nt, Artificial Sequence
  spacer sequence CTCN PAM
aauuccucuccucccucaaa

SEQ ID NO: 27665 - RNA, 20 nt, Artificial Sequence
  spacer sequence CTCN PAM
ccgccccauguaucugcccc

SEQ ID NO: 27666 - RNA, 20 nt, Artificial Sequence
  spacer sequence CTCN PAM
ugacccuccccgccccaugu

SEQ ID NO: 27667 - RNA, 20 nt, Artificial Sequence
  spacer sequence CTCN PAM
ggaguggauuuuaugacaca

SEQ ID NO: 27668 - RNA, 20 nt, Artificial Sequence
  spacer sequence CTCN PAM
ugaggccuguccgucuccug

SEQ ID NO: 27669 - RNA, 20 nt, Artificial Sequence
  spacer sequence CTCN PAM
agaugcccuuucuuguguca

SEQ ID NO: 27670 - RNA, 20 nt, Artificial Sequence
  spacer sequence CTCN PAM
guccaccccugcccccagau

SEQ ID NO: 27671 - RNA, 20 nt, Artificial Sequence
  spacer sequence CTCN PAM
caguccaccccugcccccag

SEQ ID NO: 27672 - RNA, 20 nt, Artificial Sequence
  spacer sequence CTCN PAM
gccucucaguccaccccugc

SEQ ID NO: 27673 - RNA, 20 nt, Artificial Sequence
  spacer sequence CTCN PAM
ggcuuugcuguuaucaucca

SEQ ID NO: 27674 - RNA, 20 nt, Artificial Sequence
  spacer sequence CTCN PAM
cgccuguaauccaagcgcuc

SEQ ID NO: 27675 - RNA, 20 nt, Artificial Sequence
  spacer sequence CTCN PAM
gggaggcugaggcaggcgga

SEQ ID NO: 27676 - RNA, 20 nt, Artificial Sequence
  spacer sequence CTCN PAM
cagagcgcuuggauuacagg

SEQ ID NO: 27677 - RNA, 20 nt, Artificial Sequence
  spacer sequence CTCN PAM
gccucccagagcgcuuggau

SEQ ID NO: 27678 - RNA, 20 nt, Artificial Sequence
  spacer sequence CTCN PAM
guugauccgccugccucagc

SEQ ID NO: 27679 - RNA, 20 nt, Artificial Sequence
  spacer sequence CTCN PAM
aaccccugaccucaguugau

SEQ ID NO: 27680 - RNA, 20 nt, Artificial Sequence
  spacer sequence CTCN PAM
acugaaaauaccaaaauuag

SEQ ID NO: 27681 - RNA, 20 nt, Artificial Sequence
  spacer sequence CTCN PAM
gcuaauuuugguauuuucag

SEQ ID NO: 27682 - RNA, 20 nt, Artificial Sequence
  spacer sequence CTCN PAM
caaguagcugggauuacagg

SEQ ID NO: 27683 - RNA, 20 nt, Artificial Sequence
  spacer sequence CTCN PAM
gccucccaaguagcugggau

SEQ ID NO: 27684 - RNA, 20 nt, Artificial Sequence
  spacer sequence CTCN PAM
cucggccucccaaguagcug

SEQ ID NO: 27685 - RNA, 20 nt, Artificial Sequence
  spacer sequence CTCN PAM
ucccucggccucccaaguag

SEQ ID NO: 27686 - RNA, 20 nt, Artificial Sequence
  spacer sequence CTCN PAM
cagguucaagcgauucuccu

SEQ ID NO: 27687 - RNA, 20 nt, Artificial Sequence
  spacer sequence CTCN PAM
accucccagguucaagcgau

SEQ ID NO: 27688 - RNA, 20 nt, Artificial Sequence
  spacer sequence CTCN PAM
cugcaaccuccaccucccag

SEQ ID NO: 27689 - RNA, 20 nt, Artificial Sequence
  spacer sequence CTCN PAM
gcucacugcaaccuccaccu

SEQ ID NO: 27690 - RNA, 20 nt, Artificial Sequence
  spacer sequence CTCN PAM
agcuugggcaaaaagaguga

SEQ ID NO: 27691 - RNA, 20 nt, Artificial Sequence
  spacer sequence CTCN PAM
uuuugcccaagcuggagugc

SEQ ID NO: 27692 - RNA, 20 nt, Artificial Sequence
  spacer sequence CTCN PAM
aucucaaaaaaaaaaaaaca

SEQ ID NO: 27693 - RNA, 20 nt, Artificial Sequence
  spacer sequence CTCN PAM
aaaaaaaaaaaacaacaaac

SEQ ID NO: 27694 - RNA, 20 nt, Artificial Sequence
  spacer sequence CTCN PAM
aacuguuacacaaagaguca

SEQ ID NO: 27695 - RNA, 20 nt, Artificial Sequence
  spacer sequence CTCN PAM
uuguguaacaguuugaggau

SEQ ID NO: 27696 - RNA, 20 nt, Artificial Sequence
  spacer sequence CTCN PAM
gcaauuccacuccuaggcau

SEQ ID NO: 27697 - RNA, 20 nt, Artificial Sequence
  spacer sequence CTCN PAM
uaggcauacacccaagagaa

SEQ ID NO: 27698 - RNA, 20 nt, Artificial Sequence
  spacer sequence CTCN PAM
uggguguaugccuaggagug

SEQ ID NO: 27699 - RNA, 20 nt, Artificial Sequence
  spacer sequence CTCN PAM
aaaagagaaaacagcccaua

SEQ ID NO: 27700 - RNA, 20 nt, Artificial Sequence
  spacer sequence CTCN PAM
uuuugaguuuguaaagccgu

SEQ ID NO: 27701 - RNA, 20 nt, Artificial Sequence
  spacer sequence CTCN PAM
gcuauucaggaggcugagaa

SEQ ID NO: 27702 - RNA, 20 nt, Artificial Sequence
  spacer sequence CTCN PAM
ugaauagcugagauuacagg

SEQ ID NO: 27703 - RNA, 20 nt, Artificial Sequence
  spacer sequence CTCN PAM
gccuccugaauagcugagau

SEQ ID NO: 27704 - RNA, 20 nt, Artificial Sequence
  spacer sequence CTCN PAM
uuucucagccuccugaauag

SEQ ID NO: 27705 - RNA, 20 nt, Artificial Sequence
  spacer sequence CTCN PAM
cagguucaagcaauucuccu

SEQ ID NO: 27706 - RNA, 20 nt, Artificial Sequence
  spacer sequence CTCN PAM
gccucccagguucaagcaau

SEQ ID NO: 27707 - RNA, 20 nt, Artificial Sequence
  spacer sequence CTCN PAM
ggucacugcaaccuccgccu

SEQ ID NO: 27708 - RNA, 20 nt, Artificial Sequence
  spacer sequence CTCN PAM
agccuggguaacagagugag

SEQ ID NO: 27709 - RNA, 20 nt, Artificial Sequence
  spacer sequence CTCN PAM
guuacccaggcuggagugca

SEQ ID NO: 27710 - RNA, 20 nt, Artificial Sequence
  spacer sequence CTCN PAM
cucuguuacccaggcuggag

SEQ ID NO: 27711 - RNA, 20 nt, Artificial Sequence
  spacer sequence CTCN PAM
gucucaaaaaaaaaaacccc

SEQ ID NO: 27712 - RNA, 20 nt, Artificial Sequence
  spacer sequence CTCN PAM
aaaaaaaaaaccccagaugu

SEQ ID NO: 27713 - RNA, 20 nt, Artificial Sequence
  spacer sequence CTCN PAM
acacacuggaauauuucuga

SEQ ID NO: 27714 - RNA, 20 nt, Artificial Sequence
  spacer sequence CTCN PAM
gaaauauuccagugugugga

SEQ ID NO: 27715 - RNA, 20 nt, Artificial Sequence
  spacer sequence CTCN PAM
ucauuccuuuucauggcuca

SEQ ID NO: 27716 - RNA, 20 nt, Artificial Sequence
  spacer sequence CTCN PAM
gacacaggccacaaugugga

SEQ ID NO: 27717 - RNA, 20 nt, Artificial Sequence
  spacer sequence CTCN PAM
ggcuacauccacauuguggc

SEQ ID NO: 27718 - RNA, 20 nt, Artificial Sequence
  spacer sequence CTCN PAM
ugcucagugagagaagccag

SEQ ID NO: 27719 - RNA, 20 nt, Artificial Sequence
  spacer sequence CTCN PAM
gugagagaagccaggcacaa

SEQ ID NO: 27720 - RNA, 20 nt, Artificial Sequence
  spacer sequence CTCN PAM
cugagcaugagguccucagg

SEQ ID NO: 27721 - RNA, 20 nt, Artificial Sequence
  spacer sequence CTCN PAM
cacugagcaugagguccuca

SEQ ID NO: 27722 - RNA, 20 nt, Artificial Sequence
  spacer sequence CTCN PAM
guggauuggccuguccugga

SEQ ID NO: 27723 - RNA, 20 nt, Artificial Sequence
  spacer sequence CTCN PAM
ugucucuguggauuggccug

SEQ ID NO: 27724 - RNA, 20 nt, Artificial Sequence
  spacer sequence CTCN PAM
ccuaggaccuggcacacaca

SEQ ID NO: 27725 - RNA, 20 nt, Artificial Sequence
  spacer sequence CTCN PAM
uccccuaggaccuggcacac

SEQ ID NO: 27726 - RNA, 20 nt, Artificial Sequence
  spacer sequence CTCN PAM
aucuccuccccuaggaccug

SEQ ID NO: 27727 - RNA, 20 nt, Artificial Sequence
  spacer sequence CTCN PAM
ccaucuccuccccuaggacc

SEQ ID NO: 27728 - RNA, 20 nt, Artificial Sequence
  spacer sequence CTCN PAM
gugcugggugcgguggcuca

SEQ ID NO: 27729 - RNA, 20 nt, Artificial Sequence
  spacer sequence CTCN PAM
cgccuguaaucccagcacuu

SEQ ID NO: 27730 - RNA, 20 nt, Artificial Sequence
  spacer sequence CTCN PAM
caaagugcugggauuacagg

SEQ ID NO: 27731 - RNA, 20 nt, Artificial Sequence
  spacer sequence CTCN PAM
ggugauccgccugccuaggc

SEQ ID NO: 27732 - RNA, 20 nt, Artificial Sequence
  spacer sequence CTCN PAM
cgaccucaggugauccgccu

SEQ ID NO: 27733 - RNA, 20 nt, Artificial Sequence
  spacer sequence CTCN PAM
aacucccgaccucaggugau

SEQ ID NO: 27734 - RNA, 20 nt, Artificial Sequence
  spacer sequence CTCN PAM
auguuggucaggcuggucuc

SEQ ID NO: 27735 - RNA, 20 nt, Artificial Sequence
  spacer sequence CTCN PAM
acuaaaaauacaaaacuaac

SEQ ID NO: 27736 - RNA, 20 nt, Artificial Sequence
  spacer sequence CTCN PAM
caaguagcugggauuacagg

SEQ ID NO: 27737 - RNA, 20 nt, Artificial Sequence
  spacer sequence CTCN PAM
gccucccaaguagcugggau

SEQ ID NO: 27738 - RNA, 20 nt, Artificial Sequence
  spacer sequence CTCN PAM
ugccucagccucccaaguag

SEQ ID NO: 27739 - RNA, 20 nt, Artificial Sequence
  spacer sequence CTCN PAM
cagguucaagcgauucuccu

SEQ ID NO: 27740 - RNA, 20 nt, Artificial Sequence
  spacer sequence CTCN PAM
cugcacugccaccucccagg

SEQ ID NO: 27741 - RNA, 20 nt, Artificial Sequence
  spacer sequence CTCN PAM
gcucacugcacugccaccuc

SEQ ID NO: 27742 - RNA, 20 nt, Artificial Sequence
  spacer sequence CTCN PAM
agccugggcaacaagagcga

SEQ ID NO: 27743 - RNA, 20 nt, Artificial Sequence
  spacer sequence CTCN PAM
uguugcccaggcuggagugc

SEQ ID NO: 27744 - RNA, 20 nt, Artificial Sequence
  spacer sequence CTCN PAM
agagaaaaaaaaaauucugg

SEQ ID NO: 27745 - RNA, 20 nt, Artificial Sequence
  spacer sequence CTCN PAM
ugagacagaauuucgcucuu

SEQ ID NO: 27746 - RNA, 20 nt, Artificial Sequence
  spacer sequence CTCN PAM
aucuaucuaguuccagaauu

SEQ ID NO: 27747 - RNA, 20 nt, Artificial Sequence
  spacer sequence CTCN PAM
uaacauuguacacguccuaa

SEQ ID NO: 27748 - RNA, 20 nt, Artificial Sequence
  spacer sequence CTCN PAM
aaaaaaaaaaaaguuuuuga

SEQ ID NO: 27749 - RNA, 20 nt, Artificial Sequence
  spacer sequence CTCN PAM
gucucaaaaaaaaaaaaagu

SEQ ID NO: 27750 - RNA, 20 nt, Artificial Sequence
  spacer sequence CTCN PAM
agccuggggggauacagcaa

SEQ ID NO: 27751 - RNA, 20 nt, Artificial Sequence
  spacer sequence CTCN PAM
gcucacugcaaccuccaccu

SEQ ID NO: 27752 - RNA, 20 nt, Artificial Sequence
  spacer sequence CTCN PAM
cugcaaccuccaccuccagg

SEQ ID NO: 27753 - RNA, 20 nt, Artificial Sequence
  spacer sequence CTCN PAM
accuccaggguucaagcaau

SEQ ID NO: 27754 - RNA, 20 nt, Artificial Sequence
  spacer sequence CTCN PAM
aggguucaagcaauucuccu

SEQ ID NO: 27755 - RNA, 20 nt, Artificial Sequence
  spacer sequence CTCN PAM
ugccucagccuccugaguag

SEQ ID NO: 27756 - RNA, 20 nt, Artificial Sequence
  spacer sequence CTCN PAM
gccuccugaguagcugggau

SEQ ID NO: 27757 - RNA, 20 nt, Artificial Sequence
  spacer sequence CTCN PAM
ugaguagcugggauuacagg

SEQ ID NO: 27758 - RNA, 20 nt, Artificial Sequence
  spacer sequence CTCN PAM
ggaggcugaggcaggagaau

SEQ ID NO: 27759 - RNA, 20 nt, Artificial Sequence
  spacer sequence CTCN PAM
uguaaucccagcuacucagg

SEQ ID NO: 27760 - RNA, 20 nt, Artificial Sequence
  spacer sequence CTCN PAM
cagcuaauuuuuguauuuuu

SEQ ID NO: 27761 - RNA, 20 nt, Artificial Sequence
  spacer sequence CTCN PAM
acuaaaaauacaaaaauuag

SEQ ID NO: 27762 - RNA, 20 nt, Artificial Sequence
  spacer sequence CTCN PAM
ugaccucgugauccacccgc

SEQ ID NO: 27763 - RNA, 20 nt, Artificial Sequence
  spacer sequence CTCN PAM
ugauccacccgccuuggccu

SEQ ID NO: 27764 - RNA, 20 nt, Artificial Sequence
  spacer sequence CTCN PAM
caaagugcugggauuacagg

SEQ ID NO: 27765 - RNA, 20 nt, Artificial Sequence
  spacer sequence CTCN PAM
cgccuguaaucccagcacuu

SEQ ID NO: 27766 - RNA, 20 nt, Artificial Sequence
  spacer sequence CTCN PAM
acuaaaaguacaaaaauuag

SEQ ID NO: 27767 - RNA, 20 nt, Artificial Sequence
  spacer sequence CTCN PAM
aacuccuaaccucaggugau

SEQ ID NO: 27768 - RNA, 20 nt, Artificial Sequence
  spacer sequence CTCN PAM
uaaccucaggugauccgccu

SEQ ID NO: 27769 - RNA, 20 nt, Artificial Sequence
  spacer sequence CTCN PAM
ggugauccgccugcuucggc

SEQ ID NO: 27770 - RNA, 20 nt, Artificial Sequence
  spacer sequence CTCN PAM
caaagugcugggauuacaga

SEQ ID NO: 27771 - RNA, 20 nt, Artificial Sequence
  spacer sequence CTCN PAM
caucuguaaucccagcacuu

SEQ ID NO: 27772 - RNA, 20 nt, Artificial Sequence
  spacer sequence CTCN PAM
aaaaaaacuuuuuggcuggg

SEQ ID NO: 27773 - RNA, 20 nt, Artificial Sequence
  spacer sequence CTCN PAM
gucucaaaaaaaacuuuuug

SEQ ID NO: 27774 - RNA, 20 nt, Artificial Sequence
  spacer sequence CTCN PAM
ccgucucaaaaaaaacuuuu

SEQ ID NO: 27775 - RNA, 20 nt, Artificial Sequence
  spacer sequence CTCN PAM
cucucuugcccaggcuggag

SEQ ID NO: 27776 - RNA, 20 nt, Artificial Sequence
  spacer sequence CTCN PAM
cuugcccaggcuggagugcg

SEQ ID NO: 27777 - RNA, 20 nt, Artificial Sequence
  spacer sequence CTCN PAM
ugcccaggcuggagugcggu

SEQ ID NO: 27778 - RNA, 20 nt, Artificial Sequence
  spacer sequence CTCN PAM
agccugggcaagagagcgag

SEQ ID NO: 27779 - RNA, 20 nt, Artificial Sequence
  spacer sequence CTCN PAM
gcucacugcaagcuccgccu

SEQ ID NO: 27780 - RNA, 20 nt, Artificial Sequence
  spacer sequence CTCN PAM
cugcaagcuccgccuaccgg

SEQ ID NO: 27781 - RNA, 20 nt, Artificial Sequence
  spacer sequence CTCN PAM
gccuaccggguucacaccau

SEQ ID NO: 27782 - RNA, 20 nt, Artificial Sequence
  spacer sequence CTCN PAM
ugccucagccucccgaguag

SEQ ID NO: 27783 - RNA, 20 nt, Artificial Sequence
  spacer sequence CTCN PAM
gccucccgaguaguagcugg

SEQ ID NO: 27784 - RNA, 20 nt, Artificial Sequence
  spacer sequence CTCN PAM
cgaguaguagcugggacuac

SEQ ID NO: 27785 - RNA, 20 nt, Artificial Sequence
  spacer sequence CTCN PAM
ggaggcugaggcaggagaau

SEQ ID NO: 27786 - RNA, 20 nt, Artificial Sequence
  spacer sequence CTCN PAM
uguagucccagcuacuacuc

SEQ ID NO: 27787 - RNA, 20 nt, Artificial Sequence
  spacer sequence CTCN PAM
accacaccuggcuaauuuuu

SEQ ID NO: 27788 - RNA, 20 nt, Artificial Sequence
  spacer sequence CTCN PAM
acuaaaauuacaaaaaauua

SEQ ID NO: 27789 - RNA, 20 nt, Artificial Sequence
  spacer sequence CTCN PAM
aucuccugaccucgugaucu

SEQ ID NO: 27790 - RNA, 20 nt, Artificial Sequence
  spacer sequence CTCN PAM
ugaccucgugaucugcccgu

SEQ ID NO: 27791 - RNA, 20 nt, Artificial Sequence
  spacer sequence CTCN PAM
ugaucugcccgucucagccu

SEQ ID NO: 27792 - RNA, 20 nt, Artificial Sequence
  spacer sequence CTCN PAM
gccucccaaagugcugggau

SEQ ID NO: 27793 - RNA, 20 nt, Artificial Sequence
  spacer sequence CTCN PAM
caaagugcugggauuacagg

SEQ ID NO: 27794 - RNA, 20 nt, Artificial Sequence
  spacer sequence CTCN PAM
caccuguaaucccagcacuu

SEQ ID NO: 27795 - RNA, 20 nt, Artificial Sequence
  spacer sequence CTCN PAM
ccaguccuuccuggagccag

SEQ ID NO: 27796 - RNA, 20 nt, Artificial Sequence
  spacer sequence CTCN PAM
aggaaggacuggggaggggc

SEQ ID NO: 27797 - RNA, 20 nt, Artificial Sequence
  spacer sequence CTCN PAM
agaaagauauguggcaacac

SEQ ID NO: 27798 - RNA, 20 nt, Artificial Sequence
  spacer sequence CTCN PAM
agaacuuccgcccucacagg

SEQ ID NO: 27799 - RNA, 20 nt, Artificial Sequence
  spacer sequence CTCN PAM
cagggcuggagccuugagag

SEQ ID NO: 27800 - RNA, 20 nt, Artificial Sequence
  spacer sequence CTCN PAM
agcccugugagggcggaagu

SEQ ID NO: 27801 - RNA, 20 nt, Artificial Sequence
  spacer sequence CTCN PAM
aggcuccagcccugugaggg

SEQ ID NO: 27802 - RNA, 20 nt, Artificial Sequence
  spacer sequence CTCN PAM
caaggcuccagcccugugag

SEQ ID NO: 27803 - RNA, 20 nt, Artificial Sequence
  spacer sequence CTCN PAM
gggaccucucaaggcuccag

SEQ ID NO: 27804 - RNA, 20 nt, Artificial Sequence
  spacer sequence CTCN PAM
auuuccccguucgugaaaug

SEQ ID NO: 27805 - RNA, 20 nt, Artificial Sequence
  spacer sequence CTCN PAM
gggaaaagcugugaagcccc

SEQ ID NO: 27806 - RNA, 20 nt, Artificial Sequence
  spacer sequence CTCN PAM
cccagagccuggggccccgu

SEQ ID NO: 27807 - RNA, 20 nt, Artificial Sequence
  spacer sequence CTCN PAM
cagagccuggggccccguuc

SEQ ID NO: 27808 - RNA, 20 nt, Artificial Sequence
  spacer sequence CTCN PAM
gggagagauuugugcugggg

SEQ ID NO: 27809 - RNA, 20 nt, Artificial Sequence
  spacer sequence CTCN PAM
gauccgaggucgcgaccccg

SEQ ID NO: 27810 - RNA, 20 nt, Artificial Sequence
  spacer sequence CTCN PAM
gaucugagaacggggcccca

SEQ ID NO: 27811 - RNA, 20 nt, Artificial Sequence
  spacer sequence CTCN PAM
ccgcggagcugugggugcug

SEQ ID NO: 27812 - RNA, 20 nt, Artificial Sequence
  spacer sequence CTCN PAM
gcggagcugugggugcugag

SEQ ID NO: 27813 - RNA, 20 nt, Artificial Sequence
  spacer sequence CTCN PAM
gcggagagacuugaucccau

SEQ ID NO: 27814 - RNA, 20 nt, Artificial Sequence
  spacer sequence CTCN PAM
gcacccacagcuccgcggag

SEQ ID NO: 27815 - RNA, 20 nt, Artificial Sequence
  spacer sequence CTCN PAM
cauuucagugcacauguuug

SEQ ID NO: 27816 - RNA, 20 nt, Artificial Sequence
  spacer sequence CTCN PAM
gcuguucgcaauuuugccgg

SEQ ID NO: 27817 - RNA, 20 nt, Artificial Sequence
  spacer sequence CTCN PAM
guucuugcccuugcgaaggc

SEQ ID NO: 27818 - RNA, 20 nt, Artificial Sequence
  spacer sequence CTCN PAM
cgcccuggcagugccgggug

SEQ ID NO: 27819 - RNA, 20 nt, Artificial Sequence
  spacer sequence CTCN PAM
ggaaacccccccauuuccuc

SEQ ID NO: 27820 - RNA, 20 nt, Artificial Sequence
  spacer sequence CTCN PAM
cauugucugacuucucagga

SEQ ID NO: 27821 - RNA, 20 nt, Artificial Sequence
  spacer sequence CTCN PAM
aagaacucagccucuagggg

SEQ ID NO: 27822 - RNA, 20 nt, Artificial Sequence
  spacer sequence CTCN PAM
gccucuaggggcugggcggg

SEQ ID NO: 27823 - RNA, 20 nt, Artificial Sequence
  spacer sequence CTCN PAM
aggggcugggcgggagcaaa

SEQ ID NO: 27824 - RNA, 20 nt, Artificial Sequence
  spacer sequence CTCN PAM
cgcccagccccuagaggcug

SEQ ID NO: 27825 - RNA, 20 nt, Artificial Sequence
  spacer sequence CTCN PAM
gggauccuugcuucacugcc

SEQ ID NO: 27826 - RNA, 20 nt, Artificial Sequence
  spacer sequence CTCN PAM
gccaccaaaccauccaugac

SEQ ID NO: 27827 - RNA, 20 nt, Artificial Sequence
  spacer sequence CTCN PAM
gugcugcaucuggcaggccu

SEQ ID NO: 27828 - RNA, 20 nt, Artificial Sequence
  spacer sequence CTCN PAM
ggccugccagaugcagcaca

SEQ ID NO: 27829 - RNA, 20 nt, Artificial Sequence
  spacer sequence CTCN PAM
uagcaccccccaagucaacc

SEQ ID NO: 27830 - RNA, 20 nt, Artificial Sequence
  spacer sequence CTCN PAM
gggccggguugacuuggggg

SEQ ID NO: 27831 - RNA, 20 nt, Artificial Sequence
  spacer sequence CTCN PAM
gaagaaauacucagugcagg

SEQ ID NO: 27832 - RNA, 20 nt, Artificial Sequence
  spacer sequence CTCN PAM
gugcagggucagaaaagguu

SEQ ID NO: 27833 - RNA, 20 nt, Artificial Sequence
  spacer sequence CTCN PAM
aggucuuaaccuuuucugac

SEQ ID NO: 27834 - RNA, 20 nt, Artificial Sequence
  spacer sequence CTCN PAM
accccgccuaggugcuuggg

SEQ ID NO: 27835 - RNA, 20 nt, Artificial Sequence
  spacer sequence CTCN PAM
caccuguaaucccagcacuu

SEQ ID NO: 27836 - RNA, 20 nt, Artificial Sequence
  spacer sequence CTCN PAM
caaagugcugggauuacagg

SEQ ID NO: 27837 - RNA, 20 nt, Artificial Sequence
  spacer sequence CTCN PAM
gccucccaaagugcugggau

SEQ ID NO: 27838 - RNA, 20 nt, Artificial Sequence
  spacer sequence CTCN PAM
ggugauccgccugccucggc

SEQ ID NO: 27839 - RNA, 20 nt, Artificial Sequence
  spacer sequence CTCN PAM
cgaccucaggugauccgccu

SEQ ID NO: 27840 - RNA, 20 nt, Artificial Sequence
  spacer sequence CTCN PAM
aacucccgaccucaggugau

SEQ ID NO: 27841 - RNA, 20 nt, Artificial Sequence
  spacer sequence CTCN PAM
ggagacugaggcaggagaau

SEQ ID NO: 27842 - RNA, 20 nt, Artificial Sequence
  spacer sequence CTCN PAM
ugaguagcugggauuacagg

SEQ ID NO: 27843 - RNA, 20 nt, Artificial Sequence
  spacer sequence CTCN PAM
gucuccugaguagcugggau

SEQ ID NO: 27844 - RNA, 20 nt, Artificial Sequence
  spacer sequence CTCN PAM
ugccucagucuccugaguag

SEQ ID NO: 27845 - RNA, 20 nt, Artificial Sequence
  spacer sequence CTCN PAM
gcuuuccggguucaagugau

SEQ ID NO: 27846 - RNA, 20 nt, Artificial Sequence
  spacer sequence CTCN PAM
cugcaaccuccgcuuuccgg

SEQ ID NO: 27847 - RNA, 20 nt, Artificial Sequence
  spacer sequence CTCN PAM
aucgcagcucacugcaaccu

SEQ ID NO: 27848 - RNA, 20 nt, Artificial Sequence
  spacer sequence CTCN PAM
agccugggugacagaccaag

SEQ ID NO: 27849 - RNA, 20 nt, Artificial Sequence
  spacer sequence CTCN PAM
ucaaaaaaaaaaaaaaaaau

SEQ ID NO: 27850 - RNA, 20 nt, Artificial Sequence
  spacer sequence CTCN PAM
aaaaaaaaaaaaaaaaucca

SEQ ID NO: 27851 - RNA, 20 nt, Artificial Sequence
  spacer sequence CTCN PAM
guucccaaguaugagaugag

SEQ ID NO: 27852 - RNA, 20 nt, Artificial Sequence
  spacer sequence CTCN PAM
uacuugggaacugagucacc

SEQ ID NO: 27853 - RNA, 20 nt, Artificial Sequence
  spacer sequence CTCN PAM
ucucauacuugggaacugag

SEQ ID NO: 27854 - RNA, 20 nt, Artificial Sequence
  spacer sequence CTCN PAM
guuuuucacuucguggcuug

SEQ ID NO: 27855 - RNA, 20 nt, Artificial Sequence
  spacer sequence CTCN PAM
ggugugcccauaccuuguaa

SEQ ID NO: 27856 - RNA, 20 nt, Artificial Sequence
  spacer sequence CTCN PAM
agacuuguguuuauuuucug

SEQ ID NO: 27857 - RNA, 20 nt, Artificial Sequence
  spacer sequence CTCN PAM
gaaaauaaacacaagucugg

SEQ ID NO: 27858 - RNA, 20 nt, Artificial Sequence
  spacer sequence CTCN PAM
cacccccaggggcagcugcc

SEQ ID NO: 27859 - RNA, 20 nt, Artificial Sequence
  spacer sequence CTCN PAM
agguucucaguuaaguggua

SEQ ID NO: 27860 - RNA, 20 nt, Artificial Sequence
  spacer sequence CTCN PAM
guuaagugguaacugucuug

SEQ ID NO: 27861 - RNA, 20 nt, Artificial Sequence
  spacer sequence CTCN PAM
caggucucagugcccacauu

SEQ ID NO: 27862 - RNA, 20 nt, Artificial Sequence
  spacer sequence CTCN PAM
ggucucagugcccacauuau

SEQ ID NO: 27863 - RNA, 20 nt, Artificial Sequence
  spacer sequence CTCN PAM
gugcccacauuauacaagcg

SEQ ID NO: 27864 - RNA, 20 nt, Artificial Sequence
  spacer sequence CTCN PAM
gcaaccagacccaggauggg

SEQ ID NO: 27865 - RNA, 20 nt, Artificial Sequence
  spacer sequence CTCN PAM
ccauccugggucugguugcu

SEQ ID NO: 27866 - RNA, 20 nt, Artificial Sequence
  spacer sequence CTCN PAM
ccccugccaugggcgcaggg

SEQ ID NO: 27867 - RNA, 20 nt, Artificial Sequence
  spacer sequence CTCN PAM
aucuuaugggggugucccua

SEQ ID NO: 27868 - RNA, 20 nt, Artificial Sequence
  spacer sequence CTCN PAM
ucacagcuccaucuuauggg

SEQ ID NO: 27869 - RNA, 20 nt, Artificial Sequence
  spacer sequence CTCN PAM
guuugguuucauuuacauua

SEQ ID NO: 27870 - RNA, 20 nt, Artificial Sequence
  spacer sequence CTCN PAM
caccuguaaucccagcacuc

SEQ ID NO: 27871 - RNA, 20 nt, Artificial Sequence
  spacer sequence CTCN PAM
gggaggccuaggcgggcaga

SEQ ID NO: 27872 - RNA, 20 nt, Artificial Sequence
  spacer sequence CTCN PAM
cagagugcugggauuacagg

SEQ ID NO: 27873 - RNA, 20 nt, Artificial Sequence
  spacer sequence CTCN PAM
ggugaucugcccgccuaggc

SEQ ID NO: 27874 - RNA, 20 nt, Artificial Sequence
  spacer sequence CTCN PAM
ugaccucaggugaucugccc

SEQ ID NO: 27875 - RNA, 20 nt, Artificial Sequence
  spacer sequence CTCN PAM
aacuccugaccucaggugau

SEQ ID NO: 27876 - RNA, 20 nt, Artificial Sequence
  spacer sequence CTCN PAM
acuaaaaauacaaaaaaauu

SEQ ID NO: 27877 - RNA, 20 nt, Artificial Sequence
  spacer sequence CTCN PAM
cucguguaaucccagcuacu

SEQ ID NO: 27878 - RNA, 20 nt, Artificial Sequence
  spacer sequence CTCN PAM
uguaaucccagcuacucagg

SEQ ID NO: 27879 - RNA, 20 nt, Artificial Sequence
  spacer sequence CTCN PAM
ggaggcugagucaggagaau

SEQ ID NO: 27880 - RNA, 20 nt, Artificial Sequence
  spacer sequence CTCN PAM
ugaguagcugggauuacacg

SEQ ID NO: 27881 - RNA, 20 nt, Artificial Sequence
  spacer sequence CTCN PAM
gccuccugaguagcugggau

SEQ ID NO: 27882 - RNA, 20 nt, Artificial Sequence
  spacer sequence CTCN PAM
ugacucagccuccugaguag

SEQ ID NO: 27883 - RNA, 20 nt, Artificial Sequence
  spacer sequence CTCN PAM
acccagcccccggguucaag

SEQ ID NO: 27884 - RNA, 20 nt, Artificial Sequence
  spacer sequence CTCN PAM
cugcaaccuccacccagccc

SEQ ID NO: 27885 - RNA, 20 nt, Artificial Sequence
  spacer sequence CTCN PAM
gcucacugcaaccuccaccc

SEQ ID NO: 27886 - RNA, 20 nt, Artificial Sequence
  spacer sequence CTCN PAM
agccugggcaaaagagcaaa

SEQ ID NO: 27887 - RNA, 20 nt, Artificial Sequence
  spacer sequence CTCN PAM
uuugcccaggcuggagugca

SEQ ID NO: 27888 - RNA, 20 nt, Artificial Sequence
  spacer sequence CTCN PAM
gaaaaaaaaaaaaaaaaaag

SEQ ID NO: 27889 - RNA, 20 nt, Artificial Sequence
  spacer sequence CTCN PAM
gccgggauuugccuuuuuuu

SEQ ID NO: 27890 - RNA, 20 nt, Artificial Sequence
  spacer sequence CTCN PAM
cgcaugugaucccagcacuu

SEQ ID NO: 27891 - RNA, 20 nt, Artificial Sequence
  spacer sequence CTCN PAM
gcuucccaaaagugcuggga

SEQ ID NO: 27892 - RNA, 20 nt, Artificial Sequence
  spacer sequence CTCN PAM
agccucagcuucccaaaagu

SEQ ID NO: 27893 - RNA, 20 nt, Artificial Sequence
  spacer sequence CTCN PAM
agugauccuccagccucagc

SEQ ID NO: 27894 - RNA, 20 nt, Artificial Sequence
  spacer sequence CTCN PAM
aacuucugaccucaagugau

SEQ ID NO: 27895 - RNA, 20 nt, Artificial Sequence
  spacer sequence CTCN PAM
cuauguugccuaggcugguc

SEQ ID NO: 27896 - RNA, 20 nt, Artificial Sequence
  spacer sequence CTCN PAM
uccaccauuccuggcuaauu

SEQ ID NO: 27897 - RNA, 20 nt, Artificial Sequence
  spacer sequence CTCN PAM
ggaagcagagacgggagguu

SEQ ID NO: 27898 - RNA, 20 nt, Artificial Sequence
  spacer sequence CTCN PAM
gcuucccgaguagcugggac

SEQ ID NO: 27899 - RNA, 20 nt, Artificial Sequence
  spacer sequence CTCN PAM
cgucucugcuucccgaguag

SEQ ID NO: 27900 - RNA, 20 nt, Artificial Sequence
  spacer sequence CTCN PAM
agcgaaccucccgucucugc

SEQ ID NO: 27901 - RNA, 20 nt, Artificial Sequence
  spacer sequence CTCN PAM
caggcucaagcgaaccuccc

SEQ ID NO: 27902 - RNA, 20 nt, Artificial Sequence
  spacer sequence CTCN PAM
accucccaggcucaagcgaa

SEQ ID NO: 27903 - RNA, 20 nt, Artificial Sequence
  spacer sequence CTCN PAM
uauuuaccuuuuuuuuuuua

SEQ ID NO: 27904 - RNA, 20 nt, Artificial Sequence
  spacer sequence CTCN PAM
cagaaaaguguccccaacuc

SEQ ID NO: 27905 - RNA, 20 nt, Artificial Sequence
  spacer sequence CTCN PAM
aacucgcagaaaaguguccc

SEQ ID NO: 27906 - RNA, 20 nt, Artificial Sequence
  spacer sequence CTCN PAM
acgagucuuaaguaguauuc

SEQ ID NO: 27907 - RNA, 20 nt, Artificial Sequence
  spacer sequence CTCN PAM
ucgaggggguuugguuucuc

SEQ ID NO: 27908 - RNA, 20 nt, Artificial Sequence
  spacer sequence CTCN PAM
gguugucuggccugcggccg

SEQ ID NO: 27909 - RNA, 20 nt, Artificial Sequence
  spacer sequence CTCN PAM
cgacgcgccgccagccaggc

SEQ ID NO: 27910 - RNA, 20 nt, Artificial Sequence
  spacer sequence CTCN PAM
uagacacaagcgagcaugcg

SEQ ID NO: 27911 - RNA, 20 nt, Artificial Sequence
  spacer sequence CTCN PAM
cuugugucuaggaggccgug

SEQ ID NO: 27912 - RNA, 20 nt, Artificial Sequence
  spacer sequence CTCN PAM
ggccucccauuggcugacgu

SEQ ID NO: 27913 - RNA, 20 nt, Artificial Sequence
  spacer sequence CTCN PAM
cauuggcugacgucggcgcg

SEQ ID NO: 27914 - RNA, 20 nt, Artificial Sequence
  spacer sequence CTCN PAM
cgccgacgucagccaauggg

SEQ ID NO: 27915 - RNA, 20 nt, Artificial Sequence
  spacer sequence CTCN PAM
acaccgacgcgucugaccaa

SEQ ID NO: 27916 - RNA, 20 nt, Artificial Sequence
  spacer sequence CTCN PAM
uuggucagacgcgucggugu

SEQ ID NO: 27917 - RNA, 20 nt, Artificial Sequence
  spacer sequence CTCN PAM
ggagggcguggccgugggaa

SEQ ID NO: 27918 - RNA, 20 nt, Artificial Sequence
  spacer sequence CTCN PAM
agagcgcucauuggucagac

SEQ ID NO: 27919 - RNA, 20 nt, Artificial Sequence
  spacer sequence CTCN PAM
uuucccacggccacgcccuc

SEQ ID NO: 27920 - RNA, 20 nt, Artificial Sequence
  spacer sequence CTCN PAM
uccagccgaccaauggacgc

SEQ ID NO: 27921 - RNA, 20 nt, Artificial Sequence
  spacer sequence CTCN PAM
ccucguccagccgaccaaug

SEQ ID NO: 27922 - RNA, 20 nt, Artificial Sequence
  spacer sequence CTCN PAM
uccccucguccagccgacca

SEQ ID NO: 27923 - RNA, 20 nt, Artificial Sequence
  spacer sequence CTCN PAM
cagccccgccgcgaugagcc

SEQ ID NO: 27924 - RNA, 20 nt, Artificial Sequence
  spacer sequence CTCN PAM
ucgcggcggggcugggagcc

SEQ ID NO: 27925 - RNA, 20 nt, Artificial Sequence
  spacer sequence CTCN PAM
gccgccuuugccgccuacug

SEQ ID NO: 27926 - RNA, 20 nt, Artificial Sequence
  spacer sequence CTCN PAM
guggggcucuggccgcgccu

SEQ ID NO: 27927 - RNA, 20 nt, Artificial Sequence
  spacer sequence CTCN PAM
ggccgcgccuggccuggccg

SEQ ID NO: 27928 - RNA, 20 nt, Artificial Sequence
  spacer sequence CTCN PAM
ccauggucccggccaggcca

SEQ ID NO: 27929 - RNA, 20 nt, Artificial Sequence
  spacer sequence CTCN PAM
gcucgccggcguggggaacc

SEQ ID NO: 27930 - RNA, 20 nt, Artificial Sequence
  spacer sequence CTCN PAM
ccggcguggggaacccucag

SEQ ID NO: 27931 - RNA, 20 nt, Artificial Sequence
  spacer sequence CTCN PAM
ggcuccagugaccuuggugg

SEQ ID NO: 27932 - RNA, 20 nt, Artificial Sequence
  spacer sequence CTCN PAM
agugaccuugguggggggcg

SEQ ID NO: 27933 - RNA, 20 nt, Artificial Sequence
  spacer sequence CTCN PAM
cccuccccacccccggccgg

SEQ ID NO: 27934 - RNA, 20 nt, Artificial Sequence
  spacer sequence CTCN PAM
ccacccccggccgggcacgg

SEQ ID NO: 27935 - RNA, 20 nt, Artificial Sequence
  spacer sequence CTCN PAM
gcggcccuccaggccguugu

SEQ ID NO: 27936 - RNA, 20 nt, Artificial Sequence
  spacer sequence CTCN PAM
aggccguuguaggcgcgcgg

SEQ ID NO: 27937 - RNA, 20 nt, Artificial Sequence
  spacer sequence CTCN PAM
gccccagccgucccggaccc

SEQ ID NO: 27938 - RNA, 20 nt, Artificial Sequence
  spacer sequence CTCN PAM
acgguccagcuccgccccag

SEQ ID NO: 27939 - RNA, 20 nt, Artificial Sequence
  spacer sequence CTCN PAM
gggccgagcggggcugcugc

SEQ ID NO: 27940 - RNA, 20 nt, Artificial Sequence
  spacer sequence CTCN PAM
gcccggagacgccccgccgu

SEQ ID NO: 27941 - RNA, 20 nt, Artificial Sequence
  spacer sequence CTCN PAM
ggcgcagcagccccgcucgg

SEQ ID NO: 27942 - RNA, 20 nt, Artificial Sequence
  spacer sequence CTCN PAM
gcgcccccaaccgcucgggc

SEQ ID NO: 27943 - RNA, 20 nt, Artificial Sequence
  spacer sequence CTCN PAM
gggcccuuuguccccgcuag

SEQ ID NO: 27944 - RNA, 20 nt, Artificial Sequence
  spacer sequence CTCN PAM
gggugggggagccaggaggg

SEQ ID NO: 27945 - RNA, 20 nt, Artificial Sequence
  spacer sequence CTCN PAM
cccaccccgagcgccgcuag

SEQ ID NO: 27946 - RNA, 20 nt, Artificial Sequence
  spacer sequence CTCN PAM
uggcucccccaccccgagcg

SEQ ID NO: 27947 - RNA, 20 nt, Artificial Sequence
  spacer sequence CTCN PAM
cgccccuccuggcuccccca

SEQ ID NO: 27948 - RNA, 20 nt, Artificial Sequence
  spacer sequence CTCN PAM
cccgggcgccgcaggcagcg

SEQ ID NO: 27949 - RNA, 20 nt, Artificial Sequence
  spacer sequence CTCN PAM
ggcaccgcugccugcggcgc

SEQ ID NO: 27950 - RNA, 20 nt, Artificial Sequence
  spacer sequence CTCN PAM
cggccgccgccugccccggc

SEQ ID NO: 27951 - RNA, 20 nt, Artificial Sequence
  spacer sequence CTCN PAM
gcggcggaaggccccagcgu

SEQ ID NO: 27952 - RNA, 20 nt, Artificial Sequence
  spacer sequence CTCN PAM
ugcgccugcacgcuggggcc

SEQ ID NO: 27953 - RNA, 20 nt, Artificial Sequence
  spacer sequence CTCN PAM
ggucgcaagcugcggggaca

SEQ ID NO: 27954 - RNA, 20 nt, Artificial Sequence
  spacer sequence CTCN PAM
cccggccuccgggucuccgg

SEQ ID NO: 27955 - RNA, 20 nt, Artificial Sequence
  spacer sequence CTCN PAM
cggccuccgggucuccggua

SEQ ID NO: 27956 - RNA, 20 nt, Artificial Sequence
  spacer sequence CTCN PAM
gggucuccgguaaaaccgga

SEQ ID NO: 27957 - RNA, 20 nt, Artificial Sequence
  spacer sequence CTCN PAM
gguaaaaccggaccagaagu

SEQ ID NO: 27958 - RNA, 20 nt, Artificial Sequence
  spacer sequence CTCN PAM
uuaaacgcacacgcccccuu

SEQ ID NO: 27959 - RNA, 20 nt, Artificial Sequence
  spacer sequence CTCN PAM
uccuuaaacgcacacgcccc

SEQ ID NO: 27960 - RNA, 20 nt, Artificial Sequence
  spacer sequence CTCN PAM
uccuccuuaaacgcacacgc

SEQ ID NO: 27961 - RNA, 20 nt, Artificial Sequence
  spacer sequence CTCN PAM
guguccccgccaccgacccg

SEQ ID NO: 27962 - RNA, 20 nt, Artificial Sequence
  spacer sequence CTCN PAM
cgaucccuuccugccucagg

SEQ ID NO: 27963 - RNA, 20 nt, Artificial Sequence
  spacer sequence CTCN PAM
gggucccgggcucagccucc

SEQ ID NO: 27964 - RNA, 20 nt, Artificial Sequence
  spacer sequence CTCN PAM
gccucccguccacgcucccu

SEQ ID NO: 27965 - RNA, 20 nt, Artificial Sequence
  spacer sequence CTCN PAM
cguccacgcucccugcucag

SEQ ID NO: 27966 - RNA, 20 nt, Artificial Sequence
  spacer sequence CTCN PAM
cugcucagcuuccuuugccu

SEQ ID NO: 27967 - RNA, 20 nt, Artificial Sequence
  spacer sequence CTCN PAM
gcuuccuuugccuugcagug

SEQ ID NO: 27968 - RNA, 20 nt, Artificial Sequence
  spacer sequence CTCN PAM
augcacgaguuuuccgccaa

SEQ ID NO: 27969 - RNA, 20 nt, Artificial Sequence
  spacer sequence CTCN PAM
ugcauggagcgcgcacagcg

SEQ ID NO: 27970 - RNA, 20 nt, Artificial Sequence
  spacer sequence CTCN PAM
ccugggguggggcgcggggu

SEQ ID NO: 27971 - RNA, 20 nt, Artificial Sequence
  spacer sequence CTCN PAM
cagggcccgaccccgcgccc

SEQ ID NO: 27972 - RNA, 20 nt, Artificial Sequence
  spacer sequence CTCN PAM
caggggcuucgugugcaucg

SEQ ID NO: 27973 - RNA, 20 nt, Artificial Sequence
  spacer sequence CTCN PAM
cagugaggcaagaccgaagu

SEQ ID NO: 27974 - RNA, 20 nt, Artificial Sequence
  spacer sequence CTCN PAM
cugggaggccacguugguga

SEQ ID NO: 27975 - RNA, 20 nt, Artificial Sequence
  spacer sequence CTCN PAM
gcucgucgaccugcacgccc

SEQ ID NO: 27976 - RNA, 20 nt, Artificial Sequence
  spacer sequence CTCN PAM
ucgaccugcacgcccgauac

SEQ ID NO: 27977 - RNA, 20 nt, Artificial Sequence
  spacer sequence CTCN PAM
gcguaucgggcgugcagguc

SEQ ID NO: 27978 - RNA, 20 nt, Artificial Sequence
  spacer sequence CTCN PAM
gcgggccccggggacgcagc

SEQ ID NO: 27979 - RNA, 20 nt, Artificial Sequence
  spacer sequence CTCN PAM
agccuggagagggccuggga

SEQ ID NO: 27980 - RNA, 20 nt, Artificial Sequence
  spacer sequence CTCN PAM
aggcuggagcccaccccgac

SEQ ID NO: 27981 - RNA, 20 nt, Artificial Sequence
  spacer sequence CTCN PAM
ccaggcuggagcccaccccg

SEQ ID NO: 27982 - RNA, 20 nt, Artificial Sequence
  spacer sequence CTCN PAM
caggcccucuccaggcugga

SEQ ID NO: 27983 - RNA, 20 nt, Artificial Sequence
  spacer sequence CTCN PAM
guccgggcccccugcacacu

SEQ ID NO: 27984 - RNA, 20 nt, Artificial Sequence
  spacer sequence CTCN PAM
cucacacaccuuggccgcca

SEQ ID NO: 27985 - RNA, 20 nt, Artificial Sequence
  spacer sequence CTCN PAM
cacaccuuggccgccacagg

SEQ ID NO: 27986 - RNA, 20 nt, Artificial Sequence
  spacer sequence CTCN PAM
uguggcggccaaggugugug

SEQ ID NO: 27987 - RNA, 20 nt, Artificial Sequence
  spacer sequence CTCN PAM
cuggcuccuguggcggccaa

SEQ ID NO: 27988 - RNA, 20 nt, Artificial Sequence
  spacer sequence CTCN PAM
ucguuacucccuggcuccug

SEQ ID NO: 27989 - RNA, 20 nt, Artificial Sequence
  spacer sequence CTCN PAM
uugaucucuucguuacuccc

SEQ ID NO: 27990 - RNA, 20 nt, Artificial Sequence
  spacer sequence CTCN PAM
ggggacaguacggcugcugg

SEQ ID NO: 27991 - RNA, 20 nt, Artificial Sequence
  spacer sequence CTCN PAM
caccucccuggggcagaaug

SEQ ID NO: 27992 - RNA, 20 nt, Artificial Sequence
  spacer sequence CTCN PAM
cuggggcagaauggcucaug

SEQ ID NO: 27993 - RNA, 20 nt, Artificial Sequence
  spacer sequence CTCN PAM
uggcucggggggcgguugcg

SEQ ID NO: 27994 - RNA, 20 nt, Artificial Sequence
  spacer sequence CTCN PAM
gggggcgguugcggggaggu

SEQ ID NO: 27995 - RNA, 20 nt, Artificial Sequence
  spacer sequence CTCN PAM
ccgcaaccgccccccgagcc

SEQ ID NO: 27996 - RNA, 20 nt, Artificial Sequence
  spacer sequence CTCN PAM
cacaucgcguggccuccugg

SEQ ID NO: 27997 - RNA, 20 nt, Artificial Sequence
  spacer sequence CTCN PAM
caucgcguggccuccugggg

SEQ ID NO: 27998 - RNA, 20 nt, Artificial Sequence
  spacer sequence CTCN PAM
uggggguaagauggcucagg

SEQ ID NO: 27999 - RNA, 20 nt, Artificial Sequence
  spacer sequence CTCN PAM
gggggacauagagggcugug

SEQ ID NO: 28000 - RNA, 20 nt, Artificial Sequence
  spacer sequence CTCN PAM
augucccccugagccaucuu

SEQ ID NO: 28001 - RNA, 20 nt, Artificial Sequence
  spacer sequence CTCN PAM
acagcccucuaugucccccu

SEQ ID NO: 28002 - RNA, 20 nt, Artificial Sequence
  spacer sequence CTCN PAM
uggggacaggauggcucggg

SEQ ID NO: 28003 - RNA, 20 nt, Artificial Sequence
  spacer sequence CTCN PAM
ggggccuguggggggcuguu

SEQ ID NO: 28004 - RNA, 20 nt, Artificial Sequence
  spacer sequence CTCN PAM
cacacugcauggccuccugg

SEQ ID NO: 28005 - RNA, 20 nt, Artificial Sequence
  spacer sequence CTCN PAM
cacugcauggccuccugggg

SEQ ID NO: 28006 - RNA, 20 nt, Artificial Sequence
  spacer sequence CTCN PAM
ugggguaagauggcucuggg

SEQ ID NO: 28007 - RNA, 20 nt, Artificial Sequence
  spacer sequence CTCN PAM
gggggggcuugggggcacug

SEQ ID NO: 28008 - RNA, 20 nt, Artificial Sequence
  spacer sequence CTCN PAM
acagccacagugcccccaag

SEQ ID NO: 28009 - RNA, 20 nt, Artificial Sequence
  spacer sequence CTCN PAM
cacccuuguggccuccugga

SEQ ID NO: 28010 - RNA, 20 nt, Artificial Sequence
  spacer sequence CTCN PAM
uggagacaggacagcuuggg

SEQ ID NO: 28011 - RNA, 20 nt, Artificial Sequence
  spacer sequence CTCN PAM
aggaggccacaaggguguga

SEQ ID NO: 28012 - RNA, 20 nt, Artificial Sequence
  spacer sequence CTCN PAM
cguccaugugcuucuuuucc

SEQ ID NO: 28013 - RNA, 20 nt, Artificial Sequence
  spacer sequence CTCN PAM
gccccuugcagggguggccc

SEQ ID NO: 28014 - RNA, 20 nt, Artificial Sequence
  spacer sequence CTCN PAM
ccacaguuccucaucgacaa

SEQ ID NO: 28015 - RNA, 20 nt, Artificial Sequence
  spacer sequence CTCN PAM
acaguuccucaucgacaaga

SEQ ID NO: 28016 - RNA, 20 nt, Artificial Sequence
  spacer sequence CTCN PAM
ucgacaagaacggcugcgug

SEQ ID NO: 28017 - RNA, 20 nt, Artificial Sequence
  spacer sequence CTCN PAM
auggguccguagcgcuucac

SEQ ID NO: 28018 - RNA, 20 nt, Artificial Sequence
  spacer sequence CTCN PAM
uccauggguccguagcgcuu

SEQ ID NO: 28019 - RNA, 20 nt, Artificial Sequence
  spacer sequence CTCN PAM
cuagggagcccgcuugaggc

SEQ ID NO: 28020 - RNA, 20 nt, Artificial Sequence
  spacer sequence CTCN PAM
agggagcccgcuugaggcuc

SEQ ID NO: 28021 - RNA, 20 nt, Artificial Sequence
  spacer sequence CTCN PAM
cuagagaggaccuaccaggg

SEQ ID NO: 28022 - RNA, 20 nt, Artificial Sequence
  spacer sequence CTCN PAM
agcgggcucccuagagagga

SEQ ID NO: 28023 - RNA, 20 nt, Artificial Sequence
  spacer sequence CTCN PAM
ggggcuugggagguagcugc

SEQ ID NO: 28024 - RNA, 20 nt, Artificial Sequence
  spacer sequence CTCN PAM
caagcccccgagccucaagc

SEQ ID NO: 28025 - RNA, 20 nt, Artificial Sequence
  spacer sequence CTCN PAM
ccgacaggugauagagaagg

SEQ ID NO: 28026 - RNA, 20 nt, Artificial Sequence
  spacer sequence CTCN PAM
aucaccugucggggaggaaa

SEQ ID NO: 28027 - RNA, 20 nt, Artificial Sequence
  spacer sequence CTCN PAM
acaaguguguggccccgccc

SEQ ID NO: 28028 - RNA, 20 nt, Artificial Sequence
  spacer sequence CTCN PAM
ggcggggccacacacuugug

SEQ ID NO: 28029 - RNA, 20 nt, Artificial Sequence
  spacer sequence CTCN PAM
aagggcgugggcaggggcuc

SEQ ID NO: 28030 - RNA, 20 nt, Artificial Sequence
  spacer sequence CTCN PAM
ugacggccugccugcaaacc

SEQ ID NO: 28031 - RNA, 20 nt, Artificial Sequence
  spacer sequence CTCN PAM
ggcggggugcacgcuggauu

SEQ ID NO: 28032 - RNA, 20 nt, Artificial Sequence
  spacer sequence CTCN PAM
gcgcccccaccccuggcuac

SEQ ID NO: 28033 - RNA, 20 nt, Artificial Sequence
  spacer sequence CTCN PAM
augucagggccaguugccgu

SEQ ID NO: 28034 - RNA, 20 nt, Artificial Sequence
  spacer sequence CTCN PAM
auggcacccccagccuggca

SEQ ID NO: 28035 - RNA, 20 nt, Artificial Sequence
  spacer sequence CTCN PAM
uccuccaggcucggggggcu

SEQ ID NO: 28036 - RNA, 20 nt, Artificial Sequence
  spacer sequence CTCN PAM
aggcucggggggcugugcug

SEQ ID NO: 28037 - RNA, 20 nt, Artificial Sequence
  spacer sequence CTCN PAM
gggggcugugcuggcugcag

SEQ ID NO: 28038 - RNA, 20 nt, Artificial Sequence
  spacer sequence CTCN PAM
cugcaccccagcacugcagc

SEQ ID NO: 28039 - RNA, 20 nt, Artificial Sequence
  spacer sequence CTCN PAM
uaauccgugcagccccaccu

SEQ ID NO: 28040 - RNA, 20 nt, Artificial Sequence
  spacer sequence CTCN PAM
gcacuacaccaggcccugcc

SEQ ID NO: 28041 - RNA, 20 nt, Artificial Sequence
  spacer sequence CTCN PAM
aagacucggcacuacaccag

SEQ ID NO: 28042 - RNA, 20 nt, Artificial Sequence
  spacer sequence CTCN PAM
uccaagacucggcacuacac

SEQ ID NO: 28043 - RNA, 20 nt, Artificial Sequence
  spacer sequence CTCN PAM
uaacaguuaaggcccggggc

SEQ ID NO: 28044 - RNA, 20 nt, Artificial Sequence
  spacer sequence CTCN PAM
ccuggccaggaagcagaagu

SEQ ID NO: 28045 - RNA, 20 nt, Artificial Sequence
  spacer sequence CTCN PAM
gcacuucugcuuccuggcca

SEQ ID NO: 28046 - RNA, 20 nt, Artificial Sequence
  spacer sequence CTCN PAM
ggccucugcacuucugcuuc

SEQ ID NO: 28047 - RNA, 20 nt, Artificial Sequence
  spacer sequence CTCN PAM
ccuggcuggggggugugggg

SEQ ID NO: 28048 - RNA, 20 nt, Artificial Sequence
  spacer sequence CTCN PAM
gugcaaacaguaaccaccca

SEQ ID NO: 28049 - RNA, 20 nt, Artificial Sequence
  spacer sequence CTCN PAM
gugagggcuggggauggaca

SEQ ID NO: 28050 - RNA, 20 nt, Artificial Sequence
  spacer sequence CTCN PAM
cggagggacucugugcaaac

SEQ ID NO: 28051 - RNA, 20 nt, Artificial Sequence
  spacer sequence CTCN PAM
uggccuguccauccccagcc

SEQ ID NO: 28052 - RNA, 20 nt, Artificial Sequence
  spacer sequence CTCN PAM
accagccccuccuggccugu

SEQ ID NO: 28053 - RNA, 20 nt, Artificial Sequence
  spacer sequence CTCN PAM
agcugugcaggugggcagcc

SEQ ID NO: 28054 - RNA, 20 nt, Artificial Sequence
  spacer sequence CTCN PAM
acccagugucuggggcaggu

SEQ ID NO: 28055 - RNA, 20 nt, Artificial Sequence
  spacer sequence CTCN PAM
caacccagugucuggggcag

SEQ ID NO: 28056 - RNA, 20 nt, Artificial Sequence
  spacer sequence CTCN PAM
cccagcccucguccccucuc

SEQ ID NO: 28057 - RNA, 20 nt, Artificial Sequence
  spacer sequence CTCN PAM
cagcccucguccccucucau

SEQ ID NO: 28058 - RNA, 20 nt, Artificial Sequence
  spacer sequence CTCN PAM
uccccucucauccacauggg

SEQ ID NO: 28059 - RNA, 20 nt, Artificial Sequence
  spacer sequence CTCN PAM
cauccacauggggccagcac

SEQ ID NO: 28060 - RNA, 20 nt, Artificial Sequence
  spacer sequence CTCN PAM
uccacauggggccagcacag

SEQ ID NO: 28061 - RNA, 20 nt, Artificial Sequence
  spacer sequence CTCN PAM
ugguuaccaggccuuucugc

SEQ ID NO: 28062 - RNA, 20 nt, Artificial Sequence
  spacer sequence CTCN PAM
ccugguuaccaggccuuucu

SEQ ID NO: 28063 - RNA, 20 nt, Artificial Sequence
  spacer sequence CTCN PAM
cugucccacaggcugaggag

SEQ ID NO: 28064 - RNA, 20 nt, Artificial Sequence
  spacer sequence CTCN PAM
gccugugggacagggaggga

SEQ ID NO: 28065 - RNA, 20 nt, Artificial Sequence
  spacer sequence CTCN PAM
ucagccugugggacagggag

SEQ ID NO: 28066 - RNA, 20 nt, Artificial Sequence
  spacer sequence CTCN PAM
gugggaaguaggcaaaaggc

SEQ ID NO: 28067 - RNA, 20 nt, Artificial Sequence
  spacer sequence CTCN PAM
gcggccuggggccugggaga

SEQ ID NO: 28068 - RNA, 20 nt, Artificial Sequence
  spacer sequence CTCN PAM
caggccccaggccgcggagc

SEQ ID NO: 28069 - RNA, 20 nt, Artificial Sequence
  spacer sequence CTCN PAM
cccaggccccaggccgcgga

SEQ ID NO: 28070 - RNA, 20 nt, Artificial Sequence
  spacer sequence CTCN PAM
ccucucccaggccccaggcc

SEQ ID NO: 28071 - RNA, 20 nt, Artificial Sequence
  spacer sequence CTCN PAM
cccagcccuucccugacccc

SEQ ID NO: 28072 - RNA, 20 nt, Artificial Sequence
  spacer sequence CTCN PAM
cucccccagcccuucccuga

SEQ ID NO: 28073 - RNA, 20 nt, Artificial Sequence
  spacer sequence CTCN PAM
guggggcagaccccugcuaa

SEQ ID NO: 28074 - RNA, 20 nt, Artificial Sequence
  spacer sequence CTCN PAM
ggggcuccguggggcagacc

SEQ ID NO: 28075 - RNA, 20 nt, Artificial Sequence
  spacer sequence CTCN PAM
gggccccgcgucucgggggc

SEQ ID NO: 28076 - RNA, 20 nt, Artificial Sequence
  spacer sequence CTCN PAM
ggaaaccccaggugcucagg

SEQ ID NO: 28077 - RNA, 20 nt, Artificial Sequence
  spacer sequence CTCN PAM
ugggaccacccgguuucacg

SEQ ID NO: 28078 - RNA, 20 nt, Artificial Sequence
  spacer sequence CTCN PAM
gugggcccaaacccuugaaa

SEQ ID NO: 28079 - RNA, 20 nt, Artificial Sequence
  spacer sequence CTCN PAM
gggacugggcacccacaagg

SEQ ID NO: 28080 - RNA, 20 nt, Artificial Sequence
  spacer sequence CTCN PAM
ggguggcugcucugggacug

SEQ ID NO: 28081 - RNA, 20 nt, Artificial Sequence
  spacer sequence CTCN PAM
caaguaggaaggggcuccgg

SEQ ID NO: 28082 - RNA, 20 nt, Artificial Sequence
  spacer sequence CTCN PAM
ucccaaguaggaaggggcuc

SEQ ID NO: 28083 - RNA, 20 nt, Artificial Sequence
  spacer sequence CTCN PAM
ccucccaaguaggaaggggc

SEQ ID NO: 28084 - RNA, 20 nt, Artificial Sequence
  spacer sequence CTCN PAM
gugccucuccucccaaguag

SEQ ID NO: 28085 - RNA, 20 nt, Artificial Sequence
  spacer sequence CTCN PAM
cugugccucuccucccaagu

SEQ ID NO: 28086 - RNA, 20 nt, Artificial Sequence
  spacer sequence CTCN PAM
ggacagcugggggccggggc

SEQ ID NO: 28087 - RNA, 20 nt, Artificial Sequence
  spacer sequence CTCN PAM
ucugagcaguggucagggga

SEQ ID NO: 28088 - RNA, 20 nt, Artificial Sequence
  spacer sequence CTCN PAM
gagcaguggucaggggaccu

SEQ ID NO: 28089 - RNA, 20 nt, Artificial Sequence
  spacer sequence CTCN PAM
gaggagcccuaggcccuggc

SEQ ID NO: 28090 - RNA, 20 nt, Artificial Sequence
  spacer sequence CTCN PAM
ccaccgcugcuccuagggga

SEQ ID NO: 28091 - RNA, 20 nt, Artificial Sequence
  spacer sequence CTCN PAM
uaggggagaaacggucccug

SEQ ID NO: 28092 - RNA, 20 nt, Artificial Sequence
  spacer sequence CTCN PAM
ccuaggagcagcggugggga

SEQ ID NO: 28093 - RNA, 20 nt, Artificial Sequence
  spacer sequence CTCN PAM
gacacgccuuuaggcgaaac

SEQ ID NO: 28094 - RNA, 20 nt, Artificial Sequence
  spacer sequence CTCN PAM
ggaugguggugaggacacag

SEQ ID NO: 28095 - RNA, 20 nt, Artificial Sequence
  spacer sequence CTCN PAM
ccaccauccugagccagacu

SEQ ID NO: 28096 - RNA, 20 nt, Artificial Sequence
  spacer sequence CTCN PAM
cccuaguauggcacccgggc

SEQ ID NO: 28097 - RNA, 20 nt, Artificial Sequence
  spacer sequence CTCN PAM
gggaggaggcccagggagga

SEQ ID NO: 28098 - RNA, 20 nt, Artificial Sequence
  spacer sequence CTCN PAM
ccgagucaccuucucccccu

SEQ ID NO: 28099 - RNA, 20 nt, Artificial Sequence
  spacer sequence CTCN PAM
uccccgagucaccuucuccc

SEQ ID NO: 28100 - RNA, 20 nt, Artificial Sequence
  spacer sequence CTCN PAM
cugggccuccuccccgaguc

SEQ ID NO: 28101 - RNA, 20 nt, Artificial Sequence
  spacer sequence CTCN PAM
ucccugggccuccuccccga

SEQ ID NO: 28102 - RNA, 20 nt, Artificial Sequence
  spacer sequence CTCN PAM
ccagaaccccacccuccccu

SEQ ID NO: 28103 - RNA, 20 nt, Artificial Sequence
  spacer sequence CTCN PAM
ccuaggccccuggacccugc

SEQ ID NO: 28104 - RNA, 20 nt, Artificial Sequence
  spacer sequence CTCN PAM
ccuagacuccuagaccccac

SEQ ID NO: 28105 - RNA, 20 nt, Artificial Sequence
  spacer sequence CTCN PAM
uagaccccaccucccccagc

SEQ ID NO: 28106 - RNA, 20 nt, Artificial Sequence
  spacer sequence CTCN PAM
cccagcucucagccaccucc

SEQ ID NO: 28107 - RNA, 20 nt, Artificial Sequence
  spacer sequence CTCN PAM
cagccaccuccuccccgggg

SEQ ID NO: 28108 - RNA, 20 nt, Artificial Sequence
  spacer sequence CTCN PAM
gccaccuccuccccgggggu

SEQ ID NO: 28109 - RNA, 20 nt, Artificial Sequence
  spacer sequence CTCN PAM
uccccggggguccuagacug

SEQ ID NO: 28110 - RNA, 20 nt, Artificial Sequence
  spacer sequence CTCN PAM
ccggggguccuagacugggu

SEQ ID NO: 28111 - RNA, 20 nt, Artificial Sequence
  spacer sequence CTCN PAM
cccagaccccuggaugccac

SEQ ID NO: 28112 - RNA, 20 nt, Artificial Sequence
  spacer sequence CTCN PAM
cugagccccuagaagccccc

SEQ ID NO: 28113 - RNA, 20 nt, Artificial Sequence
  spacer sequence CTCN PAM
gggagguggcauccaggggu

SEQ ID NO: 28114 - RNA, 20 nt, Artificial Sequence
  spacer sequence CTCN PAM
uccagaccacugagccccac

SEQ ID NO: 28115 - RNA, 20 nt, Artificial Sequence
  spacer sequence CTCN PAM
agaccacugagccccacguu

SEQ ID NO: 28116 - RNA, 20 nt, Artificial Sequence
  spacer sequence CTCN PAM
guggucuggaggagggccgg

SEQ ID NO: 28117 - RNA, 20 nt, Artificial Sequence
  spacer sequence CTCN PAM
agcccccaucuacccccucc

SEQ ID NO: 28118 - RNA, 20 nt, Artificial Sequence
  spacer sequence CTCN PAM
cccaggcucuuagauccggc

SEQ ID NO: 28119 - RNA, 20 nt, Artificial Sequence
  spacer sequence CTCN PAM
uagauccggcccucccuaga

SEQ ID NO: 28120 - RNA, 20 nt, Artificial Sequence
  spacer sequence CTCN PAM
cuagaccccugccccugccc

SEQ ID NO: 28121 - RNA, 20 nt, Artificial Sequence
  spacer sequence CTCN PAM
aaguuguacuugcugagguc

SEQ ID NO: 28122 - RNA, 20 nt, Artificial Sequence
  spacer sequence CTCN PAM
gcaaguacaacuuugagaac

SEQ ID NO: 28123 - RNA, 20 nt, Artificial Sequence
  spacer sequence CTCN PAM
guggcgcggcggucuccgug

SEQ ID NO: 28124 - RNA, 20 nt, Artificial Sequence
  spacer sequence CTCN PAM
gugggucagggcccccugcc

SEQ ID NO: 28125 - RNA, 20 nt, Artificial Sequence
  spacer sequence CTCN PAM
ccaccccuggcagggggccc

SEQ ID NO: 28126 - RNA, 20 nt, Artificial Sequence
  spacer sequence CTCN PAM
agcaccccacaaagcuuugg

SEQ ID NO: 28127 - RNA, 20 nt, Artificial Sequence
  spacer sequence CTCN PAM
aaagcuuuguggggugcuag

SEQ ID NO: 28128 - RNA, 20 nt, Artificial Sequence
  spacer sequence CTCN PAM
ccaaagcuuuguggggugcu

SEQ ID NO: 28129 - RNA, 20 nt, Artificial Sequence
  spacer sequence CTCN PAM
gccccacccccaccugcuca

SEQ ID NO: 28130 - RNA, 20 nt, Artificial Sequence
  spacer sequence CTCN PAM
ccagacucuccaggcgcuug

SEQ ID NO: 28131 - RNA, 20 nt, Artificial Sequence
  spacer sequence CTCN PAM
ccaggcgcuuggccacgaug

SEQ ID NO: 28132 - RNA, 20 nt, Artificial Sequence
  spacer sequence CTCN PAM
aggcgcuuggccacgaugga

SEQ ID NO: 28133 - RNA, 20 nt, Artificial Sequence
  spacer sequence CTCN PAM
aucguggccaagcgccugga

SEQ ID NO: 28134 - RNA, 20 nt, Artificial Sequence
  spacer sequence CTCN PAM
ccggccagcuccgagaugag

SEQ ID NO: 28135 - RNA, 20 nt, Artificial Sequence
  spacer sequence CTCN PAM
gagaugaggaagacauacuc

SEQ ID NO: 28136 - RNA, 20 nt, Artificial Sequence
  spacer sequence CTCN PAM
gagcuggccggggagcgccg

SEQ ID NO: 28137 - RNA, 20 nt, Artificial Sequence
  spacer sequence CTCN PAM
ucucggagcuggccggggag

SEQ ID NO: 28138 - RNA, 20 nt, Artificial Sequence
  spacer sequence CTCN PAM
ggcgcggagaccugguugga

SEQ ID NO: 28139 - RNA, 20 nt, Artificial Sequence
  spacer sequence CTCN PAM
gcgccagaguaugucuuccu

SEQ ID NO: 28140 - RNA, 20 nt, Artificial Sequence
  spacer sequence CTCN PAM
gcccccaggccgcacccacc

SEQ ID NO: 28141 - RNA, 20 nt, Artificial Sequence
  spacer sequence CTCN PAM
cagggcccggccaggcgggg

SEQ ID NO: 28142 - RNA, 20 nt, Artificial Sequence
  spacer sequence CTCN PAM
gggcccggccaggcgggggc

SEQ ID NO: 28143 - RNA, 20 nt, Artificial Sequence
  spacer sequence CTCN PAM
gccccgcccccgccuggccg

SEQ ID NO: 28144 - RNA, 20 nt, Artificial Sequence
  spacer sequence CTCN PAM
ccgaacugcuggauggcgcg

SEQ ID NO: 28145 - RNA, 20 nt, Artificial Sequence
  spacer sequence CTCN PAM
acggcagcuccaaggucaug

SEQ ID NO: 28146 - RNA, 20 nt, Artificial Sequence
  spacer sequence CTCN PAM
aaggucaugugcacgcggcg

SEQ ID NO: 28147 - RNA, 20 nt, Artificial Sequence
  spacer sequence CTCN PAM
aagccgaccgccguguccag

SEQ ID NO: 28148 - RNA, 20 nt, Artificial Sequence
  spacer sequence CTCN PAM
cuccaagccgaccgccgugu

SEQ ID NO: 28149 - RNA, 20 nt, Artificial Sequence
  spacer sequence CTCN PAM
ggugucucccuccaagccga

SEQ ID NO: 28150 - RNA, 20 nt, Artificial Sequence
  spacer sequence CTCN PAM
agcucgggugucucccucca

SEQ ID NO: 28151 - RNA, 20 nt, Artificial Sequence
  spacer sequence CTCN PAM
gagaugauggccacgagcua

SEQ ID NO: 28152 - RNA, 20 nt, Artificial Sequence
  spacer sequence CTCN PAM
gaggccuccagcucgggugu

SEQ ID NO: 28153 - RNA, 20 nt, Artificial Sequence
  spacer sequence CTCN PAM
uggccaucaucucggaggcc

SEQ ID NO: 28154 - RNA, 20 nt, Artificial Sequence
  spacer sequence CTCN PAM
ucacccacuaggcccccgcu

SEQ ID NO: 28155 - RNA, 20 nt, Artificial Sequence
  spacer sequence CTCN PAM
cccacuaggcccccgcucca

SEQ ID NO: 28156 - RNA, 20 nt, Artificial Sequence
  spacer sequence CTCN PAM
aggucaccaggacgucccgg

SEQ ID NO: 28157 - RNA, 20 nt, Artificial Sequence
  spacer sequence CTCN PAM
cugccccgggacguccuggu

SEQ ID NO: 28158 - RNA, 20 nt, Artificial Sequence
  spacer sequence CTCN PAM
cgcugccccgggacguccug

SEQ ID NO: 28159 - RNA, 20 nt, Artificial Sequence
  spacer sequence CTCN PAM
cgcccgcaccuggcacacac

SEQ ID NO: 28160 - RNA, 20 nt, Artificial Sequence
  spacer sequence CTCN PAM
agaagugcgcggguccacag

SEQ ID NO: 28161 - RNA, 20 nt, Artificial Sequence
  spacer sequence CTCN PAM
gugccucuugggucccgugg

SEQ ID NO: 28162 - RNA, 20 nt, Artificial Sequence
  spacer sequence CTCN PAM
ugggucccgugggccgcgcc

SEQ ID NO: 28163 - RNA, 20 nt, Artificial Sequence
  spacer sequence CTCN PAM
ccgcucaugaagcgcugcuu

SEQ ID NO: 28164 - RNA, 20 nt, Artificial Sequence
  spacer sequence CTCN PAM
ugaagcgcugcuucucccug

SEQ ID NO: 28165 - RNA, 20 nt, Artificial Sequence
  spacer sequence CTCN PAM
cugagguucacguggucgau

SEQ ID NO: 28166 - RNA, 20 nt, Artificial Sequence
  spacer sequence CTCN PAM
gggagaagcagcgcuucaug

SEQ ID NO: 28167 - RNA, 20 nt, Artificial Sequence
  spacer sequence CTCN PAM
gcccgcgacucgaaggccac

SEQ ID NO: 28168 - RNA, 20 nt, Artificial Sequence
  spacer sequence CTCN PAM
aaggccaccgucccgucggg

SEQ ID NO: 28169 - RNA, 20 nt, Artificial Sequence
  spacer sequence CTCN PAM
gcugcagaugaccggcagga

SEQ ID NO: 28170 - RNA, 20 nt, Artificial Sequence
  spacer sequence CTCN PAM
caggagucuggccacccgug

SEQ ID NO: 28171 - RNA, 20 nt, Artificial Sequence
  spacer sequence CTCN PAM
ugcgaggccacaacacugac

SEQ ID NO: 28172 - RNA, 20 nt, Artificial Sequence
  spacer sequence CTCN PAM
gcuucccuauguccuacagu

SEQ ID NO: 28173 - RNA, 20 nt, Artificial Sequence
  spacer sequence CTCN PAM
cagcugugcacgggaggugg

SEQ ID NO: 28174 - RNA, 20 nt, Artificial Sequence
  spacer sequence CTCN PAM
cgugcacagcugggagccca

SEQ ID NO: 28175 - RNA, 20 nt, Artificial Sequence
  spacer sequence CTCN PAM
cuuucccagcacccccaccu

SEQ ID NO: 28176 - RNA, 20 nt, Artificial Sequence
  spacer sequence CTCN PAM
cugcccccgcccagcuucac

SEQ ID NO: 28177 - RNA, 20 nt, Artificial Sequence
  spacer sequence CTCN PAM
uacucccugcccccgcccag

SEQ ID NO: 28178 - RNA, 20 nt, Artificial Sequence
  spacer sequence CTCN PAM
gcuuagaucguugccugaac

SEQ ID NO: 28179 - RNA, 20 nt, Artificial Sequence
  spacer sequence CTCN PAM
aagccccagaucccccagcc

SEQ ID NO: 28180 - RNA, 20 nt, Artificial Sequence
  spacer sequence CTCN PAM
uguggacggccugccccauc

SEQ ID NO: 28181 - RNA, 20 nt, Artificial Sequence
  spacer sequence CTCN PAM
cgggccgagcuggacagcac

SEQ ID NO: 28182 - RNA, 20 nt, Artificial Sequence
  spacer sequence CTCN PAM
gcccgggaggccacgaccuc

SEQ ID NO: 28183 - RNA, 20 nt, Artificial Sequence
  spacer sequence CTCN PAM
ccaaacgcccccuccucgca

SEQ ID NO: 28184 - RNA, 20 nt, Artificial Sequence
  spacer sequence CTCN PAM
ucgcagggccgcggagacgc

SEQ ID NO: 28185 - RNA, 20 nt, Artificial Sequence
  spacer sequence CTCN PAM
cagggccgcggagacgcaga

SEQ ID NO: 28186 - RNA, 20 nt, Artificial Sequence
  spacer sequence CTCN PAM
gcggcccugcgaggaggggg

SEQ ID NO: 28187 - RNA, 20 nt, Artificial Sequence
  spacer sequence CTCN PAM
gcgucuccgcggcccugcga

SEQ ID NO: 28188 - RNA, 20 nt, Artificial Sequence
  spacer sequence CTCN PAM
gguggccccugcuggucacu

SEQ ID NO: 28189 - RNA, 20 nt, Artificial Sequence
  spacer sequence CTCN PAM
agcugccacgucccacccac

SEQ ID NO: 28190 - RNA, 20 nt, Artificial Sequence
  spacer sequence CTCN PAM
gccacccgcugggggccgcc

SEQ ID NO: 28191 - RNA, 20 nt, Artificial Sequence
  spacer sequence CTCN PAM
ucgaccagcugggcggcccc

SEQ ID NO: 28192 - RNA, 20 nt, Artificial Sequence
  spacer sequence CTCN PAM
uccaggguguugacuggcag

SEQ ID NO: 28193 - RNA, 20 nt, Artificial Sequence
  spacer sequence CTCN PAM
acccgcuccaggaccccggg

SEQ ID NO: 28194 - RNA, 20 nt, Artificial Sequence
  spacer sequence CTCN PAM
aggaccccggggccaugcgg

SEQ ID NO: 28195 - RNA, 20 nt, Artificial Sequence
  spacer sequence CTCN PAM
cugcaggaggcacagggguc

SEQ ID NO: 28196 - RNA, 20 nt, Artificial Sequence
  spacer sequence CTCN PAM
gcaggaggcacagggguccu

SEQ ID NO: 28197 - RNA, 20 nt, Artificial Sequence
  spacer sequence CTCN PAM
ugcagagagacccgcauggc

SEQ ID NO: 28198 - RNA, 20 nt, Artificial Sequence
  spacer sequence CTCN PAM
cuaggaccccugugccuccu

SEQ ID NO: 28199 - RNA, 20 nt, Artificial Sequence
  spacer sequence CTCN PAM
ucccuaggaccccugugccu

SEQ ID NO: 28200 - RNA, 20 nt, Artificial Sequence
  spacer sequence CTCN PAM
accuccucccuaggaccccu

SEQ ID NO: 28201 - RNA, 20 nt, Artificial Sequence
  spacer sequence CTCN PAM
aggcuggccccuggagggca

SEQ ID NO: 28202 - RNA, 20 nt, Artificial Sequence
  spacer sequence CTCN PAM
aggggccagccuugaguuag

SEQ ID NO: 28203 - RNA, 20 nt, Artificial Sequence
  spacer sequence CTCN PAM
ggguugccccgggccccuug

SEQ ID NO: 28204 - RNA, 20 nt, Artificial Sequence
  spacer sequence CTCN PAM
cugagaccagcuggggcgag

SEQ ID NO: 28205 - RNA, 20 nt, Artificial Sequence
  spacer sequence CTCN PAM
gggagacaagugcagaaaag

SEQ ID NO: 28206 - RNA, 20 nt, Artificial Sequence
  spacer sequence CTCN PAM
ccccagcuggucucagggag

SEQ ID NO: 28207 - RNA, 20 nt, Artificial Sequence
  spacer sequence CTCN PAM
ugucgcggaccaaacacugu

SEQ ID NO: 28208 - RNA, 20 nt, Artificial Sequence
  spacer sequence CTCN PAM
cugccuccacagggguaggg

SEQ ID NO: 28209 - RNA, 20 nt, Artificial Sequence
  spacer sequence CTCN PAM
acagggguagggacugccca

SEQ ID NO: 28210 - RNA, 20 nt, Artificial Sequence
  spacer sequence CTCN PAM
gccucugaccagugguauaa

SEQ ID NO: 28211 - RNA, 20 nt, Artificial Sequence
  spacer sequence CTCN PAM
gaccagugguauaaccccug

SEQ ID NO: 28212 - RNA, 20 nt, Artificial Sequence
  spacer sequence CTCN PAM
ccucucugggccucaguuuc

SEQ ID NO: 28213 - RNA, 20 nt, Artificial Sequence
  spacer sequence CTCN PAM
cugggccucaguuuccccca

SEQ ID NO: 28214 - RNA, 20 nt, Artificial Sequence
  spacer sequence CTCN PAM
gggccucaguuucccccauc

SEQ ID NO: 28215 - RNA, 20 nt, Artificial Sequence
  spacer sequence CTCN PAM
guuucccccaucuguaaagu

SEQ ID NO: 28216 - RNA, 20 nt, Artificial Sequence
  spacer sequence CTCN PAM
ggugggcuggacugagggcu

SEQ ID NO: 28217 - RNA, 20 nt, Artificial Sequence
  spacer sequence CTCN PAM
guccagcccaccugagccca

SEQ ID NO: 28218 - RNA, 20 nt, Artificial Sequence
  spacer sequence CTCN PAM
uggcggucaccacccacccc

SEQ ID NO: 28219 - RNA, 20 nt, Artificial Sequence
  spacer sequence CTCN PAM
cccggccuccuggcggucac

SEQ ID NO: 28220 - RNA, 20 nt, Artificial Sequence
  spacer sequence CTCN PAM
ggcuggaauccugacccaga

SEQ ID NO: 28221 - RNA, 20 nt, Artificial Sequence
  spacer sequence CTCN PAM
gggucaggauuccagccuga

SEQ ID NO: 28222 - RNA, 20 nt, Artificial Sequence
  spacer sequence CTCN PAM
gccuggacuggaauccugac

SEQ ID NO: 28223 - RNA, 20 nt, Artificial Sequence
  spacer sequence CTCN PAM
ccccggucgucacuggggag

SEQ ID NO: 28224 - RNA, 20 nt, Artificial Sequence
  spacer sequence CTCN PAM
ccagugacgaccggggugag

SEQ ID NO: 28225 - RNA, 20 nt, Artificial Sequence
  spacer sequence CTCN PAM
ggggaggaguugaagucgcu

SEQ ID NO: 28226 - RNA, 20 nt, Artificial Sequence
  spacer sequence CTCN PAM
cccgagucccugguggauga

SEQ ID NO: 28227 - RNA, 20 nt, Artificial Sequence
  spacer sequence CTCN PAM
ucccccgagucccuggugga

SEQ ID NO: 28228 - RNA, 20 nt, Artificial Sequence
  spacer sequence CTCN PAM
gugcugcugucgucacugau

SEQ ID NO: 28229 - RNA, 20 nt, Artificial Sequence
  spacer sequence CTCN PAM
cacgccagccggggggcuuu

SEQ ID NO: 28230 - RNA, 20 nt, Artificial Sequence
  spacer sequence CTCN PAM
gggacgcggggccaaagccc

SEQ ID NO: 28231 - RNA, 20 nt, Artificial Sequence
  spacer sequence CTCN PAM
gugacccuguccuucccugc

SEQ ID NO: 28232 - RNA, 20 nt, Artificial Sequence
  spacer sequence CTCN PAM
accuugcugcggucuggccc

SEQ ID NO: 28233 - RNA, 20 nt, Artificial Sequence
  spacer sequence CTCN PAM
uccaccuugcugcggucugg

SEQ ID NO: 28234 - RNA, 20 nt, Artificial Sequence
  spacer sequence CTCN PAM
accugcuccuccaccuugcu

SEQ ID NO: 28235 - RNA, 20 nt, Artificial Sequence
  spacer sequence CTCN PAM
uccaccugcuccuccaccuu

SEQ ID NO: 28236 - RNA, 20 nt, Artificial Sequence
  spacer sequence CTCN PAM
guccugcugcgucuccucca

SEQ ID NO: 28237 - RNA, 20 nt, Artificial Sequence
  spacer sequence CTCN PAM
gaccacuggccuugcucugu

SEQ ID NO: 28238 - RNA, 20 nt, Artificial Sequence
  spacer sequence CTCN PAM
ccagcucggaccacuggccu

SEQ ID NO: 28239 - RNA, 20 nt, Artificial Sequence
  spacer sequence CTCN PAM
gauggaccuccccagcucgg

SEQ ID NO: 28240 - RNA, 20 nt, Artificial Sequence
  spacer sequence CTCN PAM
gggcaagcagcucagcuguu

SEQ ID NO: 28241 - RNA, 20 nt, Artificial Sequence
  spacer sequence CTCN PAM
gcuguucuccagggacgccc

SEQ ID NO: 28242 - RNA, 20 nt, Artificial Sequence
  spacer sequence CTCN PAM
agggacgcccucuagggaac

SEQ ID NO: 28243 - RNA, 20 nt, Artificial Sequence
  spacer sequence CTCN PAM
agggaaccccgugcccugug

SEQ ID NO: 28244 - RNA, 20 nt, Artificial Sequence
  spacer sequence CTCN PAM
uggccacagggcacgggguu

SEQ ID NO: 28245 - RNA, 20 nt, Artificial Sequence
  spacer sequence CTCN PAM
uguuccuccuccuccuccug

SEQ ID NO: 28246 - RNA, 20 nt, Artificial Sequence
  spacer sequence CTCN PAM
uccuguuccuccuccuccuc

SEQ ID NO: 28247 - RNA, 20 nt, Artificial Sequence
  spacer sequence CTCN PAM
uccuccuguuccuccuccuc

SEQ ID NO: 28248 - RNA, 20 nt, Artificial Sequence
  spacer sequence CTCN PAM
uccuccuccuguuccuccuc

SEQ ID NO: 28249 - RNA, 20 nt, Artificial Sequence
  spacer sequence CTCN PAM
uguuccuccuccuccuccug

SEQ ID NO: 28250 - RNA, 20 nt, Artificial Sequence
  spacer sequence CTCN PAM
uccuguuccuccuccuccuc

SEQ ID NO: 28251 - RNA, 20 nt, Artificial Sequence
  spacer sequence CTCN PAM
uccuccuguuccuccuccuc

SEQ ID NO: 28252 - RNA, 20 nt, Artificial Sequence
  spacer sequence CTCN PAM
uccuccuccuguuccuccuc

SEQ ID NO: 28253 - RNA, 20 nt, Artificial Sequence
  spacer sequence CTCN PAM
uccuccuccuccuguuccuc

SEQ ID NO: 28254 - RNA, 20 nt, Artificial Sequence
  spacer sequence CTCN PAM
uccuccuccuccuccuguuc

SEQ ID NO: 28255 - RNA, 20 nt, Artificial Sequence
  spacer sequence CTCN PAM
ugugccuccuccuccuccuc

SEQ ID NO: 28256 - RNA, 20 nt, Artificial Sequence
  spacer sequence CTCN PAM
uccugugccuccuccuccuc

SEQ ID NO: 28257 - RNA, 20 nt, Artificial Sequence
  spacer sequence CTCN PAM
uccuccugugccuccuccuc

SEQ ID NO: 28258 - RNA, 20 nt, Artificial Sequence
  spacer sequence CTCN PAM
uccuccuccugugccuccuc

SEQ ID NO: 28259 - RNA, 20 nt, Artificial Sequence
  spacer sequence CTCN PAM
uccuccuccuccugugccuc

SEQ ID NO: 28260 - RNA, 20 nt, Artificial Sequence
  spacer sequence CTCN PAM
ugugccuccuccuccuccuc

SEQ ID NO: 28261 - RNA, 20 nt, Artificial Sequence
  spacer sequence CTCN PAM
uccugugccuccuccuccuc

SEQ ID NO: 28262 - RNA, 20 nt, Artificial Sequence
  spacer sequence CTCN PAM
uccuccugugccuccuccuc

SEQ ID NO: 28263 - RNA, 20 nt, Artificial Sequence
  spacer sequence CTCN PAM
uccuccuccugugccuccuc

SEQ ID NO: 28264 - RNA, 20 nt, Artificial Sequence
  spacer sequence CTCN PAM
uccuccuccuccugugccuc

SEQ ID NO: 28265 - RNA, 20 nt, Artificial Sequence
  spacer sequence CTCN PAM
uguuccuccuccuccuccuc

SEQ ID NO: 28266 - RNA, 20 nt, Artificial Sequence
  spacer sequence CTCN PAM
uccuguuccuccuccuccuc

SEQ ID NO: 28267 - RNA, 20 nt, Artificial Sequence
  spacer sequence CTCN PAM
uccuccuguuccuccuccuc

SEQ ID NO: 28268 - RNA, 20 nt, Artificial Sequence
  spacer sequence CTCN PAM
uccuccuccuguuccuccuc

SEQ ID NO: 28269 - RNA, 20 nt, Artificial Sequence
  spacer sequence CTCN PAM
uguuccuccuccuccuccug

SEQ ID NO: 28270 - RNA, 20 nt, Artificial Sequence
  spacer sequence CTCN PAM
uccuguuccuccuccuccuc

SEQ ID NO: 28271 - RNA, 20 nt, Artificial Sequence
  spacer sequence CTCN PAM
uccuccuguuccuccuccuc

SEQ ID NO: 28272 - RNA, 20 nt, Artificial Sequence
  spacer sequence CTCN PAM
uccuccuccuguuccuccuc

SEQ ID NO: 28273 - RNA, 20 nt, Artificial Sequence
  spacer sequence CTCN PAM
uccuccuccuccuguuccuc

SEQ ID NO: 28274 - RNA, 20 nt, Artificial Sequence
  spacer sequence CTCN PAM
uccuccuccuccuccuguuc

SEQ ID NO: 28275 - RNA, 20 nt, Artificial Sequence
  spacer sequence CTCN PAM
gggcacacccuguggaagac

SEQ ID NO: 28276 - RNA, 20 nt, Artificial Sequence
  spacer sequence CTCN PAM
uccgggcacacccuguggaa

SEQ ID NO: 28277 - RNA, 20 nt, Artificial Sequence
  spacer sequence CTCN PAM
acugcccugaagcaaacaag

SEQ ID NO: 28278 - RNA, 20 nt, Artificial Sequence
  spacer sequence CTCN PAM
ggcuggacgccuuguuugcu

SEQ ID NO: 28279 - RNA, 20 nt, Artificial Sequence
  spacer sequence CTCN PAM
cauggcgggggcugcugcgc

SEQ ID NO: 28280 - RNA, 20 nt, Artificial Sequence
  spacer sequence CTCN PAM
cucgcauggcgggggcugcu

SEQ ID NO: 28281 - RNA, 20 nt, Artificial Sequence
  spacer sequence CTCN PAM
ggguccucccucgcauggcg

SEQ ID NO: 28282 - RNA, 20 nt, Artificial Sequence
  spacer sequence CTCN PAM
acuccggguccucccucgca

SEQ ID NO: 28283 - RNA, 20 nt, Artificial Sequence
  spacer sequence CTCN PAM
ugacggcggggucagauguc

SEQ ID NO: 28284 - RNA, 20 nt, Artificial Sequence
  spacer sequence CTCN PAM
accaggucagggcugcucag

SEQ ID NO: 28285 - RNA, 20 nt, Artificial Sequence
  spacer sequence CTCN PAM
gcugaccccacagccccacc

SEQ ID NO: 28286 - RNA, 20 nt, Artificial Sequence
  spacer sequence CTCN PAM
uuuauucccuuuccaggccu

SEQ ID NO: 28287 - RNA, 20 nt, Artificial Sequence
  spacer sequence CTCN PAM
ccagggccuccuuuauuccc

SEQ ID NO: 28288 - RNA, 20 nt, Artificial Sequence
  spacer sequence CTCN PAM
gccacgacgucccccuggcc

SEQ ID NO: 28289 - RNA, 20 nt, Artificial Sequence
  spacer sequence CTCN PAM
caucucagccacgacguccc

SEQ ID NO: 28290 - RNA, 20 nt, Artificial Sequence
  spacer sequence CTCN PAM
gggacagcagugcugccuug

SEQ ID NO: 28291 - RNA, 20 nt, Artificial Sequence
  spacer sequence CTCN PAM
gggccuggacuuccuucugu

SEQ ID NO: 28292 - RNA, 20 nt, Artificial Sequence
  spacer sequence CTCN PAM
gacucugggccuggacuucc

SEQ ID NO: 28293 - RNA, 20 nt, Artificial Sequence
  spacer sequence CTCN PAM
acuuggcucugacucugggc

SEQ ID NO: 28294 - RNA, 20 nt, Artificial Sequence
  spacer sequence CTCN PAM
gucccguacccuuggacaga

SEQ ID NO: 28295 - RNA, 20 nt, Artificial Sequence
  spacer sequence CTCN PAM
guccaaggguacgggacuga

SEQ ID NO: 28296 - RNA, 20 nt, Artificial Sequence
  spacer sequence CTCN PAM
ugcucuguccaaggguacgg

SEQ ID NO: 28297 - RNA, 20 nt, Artificial Sequence
  spacer sequence CTCN PAM
cauuccuggcuugggacucu

SEQ ID NO: 28298 - RNA, 20 nt, Artificial Sequence
  spacer sequence CTCN PAM
gaucccagaucccagaucuc

SEQ ID NO: 28299 - RNA, 20 nt, Artificial Sequence
  spacer sequence CTCN PAM
gaccccagaucccagacuuc

SEQ ID NO: 28300 - RNA, 20 nt, Artificial Sequence
  spacer sequence CTCN PAM
gaccccagaccccagaucuc

SEQ ID NO: 28301 - RNA, 20 nt, Artificial Sequence
  spacer sequence CTCN PAM
gaccccagaucucagacucc

SEQ ID NO: 28302 - RNA, 20 nt, Artificial Sequence
  spacer sequence CTCN PAM
gacuccagaccccagaucuc

SEQ ID NO: 28303 - RNA, 20 nt, Artificial Sequence
  spacer sequence CTCN PAM
agaccccagaucucagaccc

SEQ ID NO: 28304 - RNA, 20 nt, Artificial Sequence
  spacer sequence CTCN PAM
gaccccagaccccagaucuc

SEQ ID NO: 28305 - RNA, 20 nt, Artificial Sequence
  spacer sequence CTCN PAM
gaccccagaucccagacccc

SEQ ID NO: 28306 - RNA, 20 nt, Artificial Sequence
  spacer sequence CTCN PAM
gacccccagaccccagaucc

SEQ ID NO: 28307 - RNA, 20 nt, Artificial Sequence
  spacer sequence CTCN PAM
gaccccagaucccagacccc

SEQ ID NO: 28308 - RNA, 20 nt, Artificial Sequence
  spacer sequence CTCN PAM
gacccccagaccccagaucc

SEQ ID NO: 28309 - RNA, 20 nt, Artificial Sequence
  spacer sequence CTCN PAM
gaccccaaaccccagauccu

SEQ ID NO: 28310 - RNA, 20 nt, Artificial Sequence
  spacer sequence CTCN PAM
gaccccagaucccagauccc

SEQ ID NO: 28311 - RNA, 20 nt, Artificial Sequence
  spacer sequence CTCN PAM
gaccccagaccccagacccc

SEQ ID NO: 28312 - RNA, 20 nt, Artificial Sequence
  spacer sequence CTCN PAM
gaucccagacccuagauccc

SEQ ID NO: 28313 - RNA, 20 nt, Artificial Sequence
  spacer sequence CTCN PAM
gaccccagaucccagacuuc

SEQ ID NO: 28314 - RNA, 20 nt, Artificial Sequence
  spacer sequence CTCN PAM
ggucugggaucuggggaucc

SEQ ID NO: 28315 - RNA, 20 nt, Artificial Sequence
  spacer sequence CTCN PAM
gggcuggggucugggaucug

SEQ ID NO: 28316 - RNA, 20 nt, Artificial Sequence
  spacer sequence CTCN PAM
cucugggcuggggucuggga

SEQ ID NO: 28317 - RNA, 20 nt, Artificial Sequence
  spacer sequence CTCN PAM
ccgggccucccucugggcug

SEQ ID NO: 28318 - RNA, 20 nt, Artificial Sequence
  spacer sequence CTCN PAM
cucaccgggccucccucugg

SEQ ID NO: 28319 - RNA, 20 nt, Artificial Sequence
  spacer sequence CTCN PAM
uuuccacucccucaccgggc

SEQ ID NO: 28320 - RNA, 20 nt, Artificial Sequence
  spacer sequence CTCN PAM
aggccgggcugcggggcucc

SEQ ID NO: 28321 - RNA, 20 nt, Artificial Sequence
  spacer sequence CTCN PAM
aaagcaggguccccaugcuc

SEQ ID NO: 28322 - RNA, 20 nt, Artificial Sequence
  spacer sequence CTCN PAM
gagcgggccucacugcuacc

SEQ ID NO: 28323 - RNA, 20 nt, Artificial Sequence
  spacer sequence CTCN PAM
gagcauggggacccugcuuu

SEQ ID NO: 28324 - RNA, 20 nt, Artificial Sequence
  spacer sequence CTCN PAM
cugcuaccuggcgguuaaag

SEQ ID NO: 28325 - RNA, 20 nt, Artificial Sequence
  spacer sequence CTCN PAM
cagcagcagaagccgcgugg

SEQ ID NO: 28326 - RNA, 20 nt, Artificial Sequence
  spacer sequence CTCN PAM
ucacagcagcagaagccgcg

SEQ ID NO: 28327 - RNA, 20 nt, Artificial Sequence
  spacer sequence CTCN PAM
ggucuuguguuuauuuucag

SEQ ID NO: 28328 - RNA, 20 nt, Artificial Sequence
  spacer sequence CTCN PAM
cagcacugggauuacagcca

SEQ ID NO: 28329 - RNA, 20 nt, Artificial Sequence
  spacer sequence CTCN PAM
cgcaguccucccagcacugg

SEQ ID NO: 28330 - RNA, 20 nt, Artificial Sequence
  spacer sequence CTCN PAM
ugggcucacgcaguccuccc

SEQ ID NO: 28331 - RNA, 20 nt, Artificial Sequence
  spacer sequence CTCN PAM
accuccugggcucacgcagu

SEQ ID NO: 28332 - RNA, 20 nt, Artificial Sequence
  spacer sequence CTCN PAM
guugcccaggcuggucucca

SEQ ID NO: 28333 - RNA, 20 nt, Artificial Sequence
  spacer sequence CTCN PAM
cucuguugcccaggcugguc

SEQ ID NO: 28334 - RNA, 20 nt, Artificial Sequence
  spacer sequence CTCN PAM
gcauguuaaaagguuuuuag

SEQ ID NO: 28335 - RNA, 20 nt, Artificial Sequence
  spacer sequence CTCN PAM
agcucagcauguuaaaaggu

SEQ ID NO: 28336 - RNA, 20 nt, Artificial Sequence
  spacer sequence CTCN PAM
aaccuacacgucuuuuucuc

SEQ ID NO: 28337 - RNA, 20 nt, Artificial Sequence
  spacer sequence CTCN PAM
ugagcagacguuaagcuaaa

SEQ ID NO: 28338 - RNA, 20 nt, Artificial Sequence
  spacer sequence CTCN PAM
ggagaaaaagacguguaggu

SEQ ID NO: 28339 - RNA, 20 nt, Artificial Sequence
  spacer sequence CTCN PAM
cuccagacuuccgguccuuu

SEQ ID NO: 28340 - RNA, 20 nt, Artificial Sequence
  spacer sequence CTCN PAM
agacuuccgguccuuugaaa

SEQ ID NO: 28341 - RNA, 20 nt, Artificial Sequence
  spacer sequence CTCN PAM
auuucaaaggaccggaaguc

SEQ ID NO: 28342 - RNA, 20 nt, Artificial Sequence
  spacer sequence CTCN PAM
acauggauugaagacacaca

SEQ ID NO: 28343 - RNA, 20 nt, Artificial Sequence
  spacer sequence CTCN PAM
caucagcggccucaggccac

SEQ ID NO: 28344 - RNA, 20 nt, Artificial Sequence
  spacer sequence CTCN PAM
ggccacaaggucuccccacc

SEQ ID NO: 28345 - RNA, 20 nt, Artificial Sequence
  spacer sequence CTCN PAM
ccaccuggcuccuuggggag

SEQ ID NO: 28346 - RNA, 20 nt, Artificial Sequence
  spacer sequence CTCN PAM
uuggggagugccaagcguug

SEQ ID NO: 28347 - RNA, 20 nt, Artificial Sequence
  spacer sequence CTCN PAM
ccaaggagccagguggggag

SEQ ID NO: 28348 - RNA, 20 nt, Artificial Sequence
  spacer sequence CTCN PAM
accggucaccacuguccuug

SEQ ID NO: 28349 - RNA, 20 nt, Artificial Sequence
  spacer sequence CTCN PAM
aggacaguggugaccggucg

SEQ ID NO: 28350 - RNA, 20 nt, Artificial Sequence
  spacer sequence CTCN PAM
gaugcagguccuugugacau

SEQ ID NO: 28351 - RNA, 20 nt, Artificial Sequence
  spacer sequence CTCN PAM
gggcucggaugcagguccuu

SEQ ID NO: 28352 - RNA, 20 nt, Artificial Sequence
  spacer sequence CTCN PAM
aggaccugaugcccucaggg

SEQ ID NO: 28353 - RNA, 20 nt, Artificial Sequence
  spacer sequence CTCN PAM
uccaggaccugaugcccuca

SEQ ID NO: 28354 - RNA, 20 nt, Artificial Sequence
  spacer sequence CTCN PAM
uccuccaggaccugaugccc

SEQ ID NO: 28355 - RNA, 20 nt, Artificial Sequence
  spacer sequence CTCN PAM
uccuccuccuccaggaccug

SEQ ID NO: 28356 - RNA, 20 nt, Artificial Sequence
  spacer sequence CTCN PAM
agcccagcccgaagccagaa

SEQ ID NO: 28357 - RNA, 20 nt, Artificial Sequence
  spacer sequence CTCN PAM
aagaccgcuuagagcgagac

SEQ ID NO: 28358 - RNA, 20 nt, Artificial Sequence
  spacer sequence CTCN PAM
aagcggucuuggagcugccg

SEQ ID NO: 28359 - RNA, 20 nt, Artificial Sequence
  spacer sequence CTCN PAM
cucuaagcggucuuggagcu

SEQ ID NO: 28360 - RNA, 20 nt, Artificial Sequence
  spacer sequence CTCN PAM
agcagucagcgcugaagucu

SEQ ID NO: 28361 - RNA, 20 nt, Artificial Sequence
  spacer sequence CTCN PAM
acgccuggaggagggaacug

SEQ ID NO: 28362 - RNA, 20 nt, Artificial Sequence
  spacer sequence CTCN PAM
aggcguggagcagcgccuaa

SEQ ID NO: 28363 - RNA, 20 nt, Artificial Sequence
  spacer sequence CTCN PAM
uccaggcguggagcagcgcc

SEQ ID NO: 28364 - RNA, 20 nt, Artificial Sequence
  spacer sequence CTCN PAM
guucccuccuccaggcgugg

SEQ ID NO: 28365 - RNA, 20 nt, Artificial Sequence
  spacer sequence CTCN PAM
agguucgccagugcggccug

SEQ ID NO: 28366 - RNA, 20 nt, Artificial Sequence
  spacer sequence CTCN PAM
aacguagcugcugacaacga

SEQ ID NO: 28367 - RNA, 20 nt, Artificial Sequence
  spacer sequence CTCN PAM
cugggcccagcaggucagag

SEQ ID NO: 28368 - RNA, 20 nt, Artificial Sequence
  spacer sequence CTCN PAM
gggcccagcaggucagaggu

SEQ ID NO: 28369 - RNA, 20 nt, Artificial Sequence
  spacer sequence CTCN PAM
gaccugcugggcccagagag

SEQ ID NO: 28370 - RNA, 20 nt, Artificial Sequence
  spacer sequence CTCN PAM
acggccacggcuccaaggcc

SEQ ID NO: 28371 - RNA, 20 nt, Artificial Sequence
  spacer sequence CTCN PAM
aaggccaaggucaaggcacu

SEQ ID NO: 28372 - RNA, 20 nt, Artificial Sequence
  spacer sequence CTCN PAM
gggagaguccgcgccugagc

SEQ ID NO: 28373 - RNA, 20 nt, Artificial Sequence
  spacer sequence CTCN PAM
cggagaacccagaccagggc

SEQ ID NO: 28374 - RNA, 20 nt, Artificial Sequence
  spacer sequence CTCN PAM
cccggagaacccagaccagg

SEQ ID NO: 28375 - RNA, 20 nt, Artificial Sequence
  spacer sequence CTCN PAM
ggcgcggacucucccggaga

SEQ ID NO: 28376 - RNA, 20 nt, Artificial Sequence
  spacer sequence CTCN PAM
gccgggggcgggauucugcu

SEQ ID NO: 28377 - RNA, 20 nt, Artificial Sequence
  spacer sequence CTCN PAM
cuguggccacugggcugagg

SEQ ID NO: 28378 - RNA, 20 nt, Artificial Sequence
  spacer sequence CTCN PAM
gcccaguggccacagggagc

SEQ ID NO: 28379 - RNA, 20 nt, Artificial Sequence
  spacer sequence CTCN PAM
ccgaaagcagggaagugggg

SEQ ID NO: 28380 - RNA, 20 nt, Artificial Sequence
  spacer sequence CTCN PAM
cuccuaaaagccagcagggc

SEQ ID NO: 28381 - RNA, 20 nt, Artificial Sequence
  spacer sequence CTCN PAM
uaaaagccagcagggcaagg

SEQ ID NO: 28382 - RNA, 20 nt, Artificial Sequence
  spacer sequence CTCN PAM
uaggcuucugaccugaccuc

SEQ ID NO: 28383 - RNA, 20 nt, Artificial Sequence
  spacer sequence CTCN PAM
ccuccuccagcuggagaagg

SEQ ID NO: 28384 - RNA, 20 nt, Artificial Sequence
  spacer sequence CTCN PAM
uccagcuggagaaggguccc

SEQ ID NO: 28385 - RNA, 20 nt, Artificial Sequence
  spacer sequence CTCN PAM
agcuggagaagggucccacg

SEQ ID NO: 28386 - RNA, 20 nt, Artificial Sequence
  spacer sequence CTCN PAM
agcuggaggaggggagguca

SEQ ID NO: 28387 - RNA, 20 nt, Artificial Sequence
  spacer sequence CTCN PAM
ugcgugggacccuucuccag

SEQ ID NO: 28388 - RNA, 20 nt, Artificial Sequence
  spacer sequence CTCN PAM
ggucccggcaucgucacaaa

SEQ ID NO: 28389 - RNA, 20 nt, Artificial Sequence
  spacer sequence CTCN PAM
gcagagccccugugccccgg

SEQ ID NO: 28390 - RNA, 20 nt, Artificial Sequence
  spacer sequence CTCN PAM
gcagaggggucguccuggau

SEQ ID NO: 28391 - RNA, 20 nt, Artificial Sequence
  spacer sequence CTCN PAM
cggggcacaggggcucugca

SEQ ID NO: 28392 - RNA, 20 nt, Artificial Sequence
  spacer sequence CTCN PAM
agggggugggggggacggug

SEQ ID NO: 28393 - RNA, 20 nt, Artificial Sequence
  spacer sequence CTCN PAM
ggggcugacccagaccugca

SEQ ID NO: 28394 - RNA, 20 nt, Artificial Sequence
  spacer sequence CTCN PAM
uggccuggcgcuguguacug

SEQ ID NO: 28395 - RNA, 20 nt, Artificial Sequence
  spacer sequence CTCN PAM
gccugcggucaggccgcgug

SEQ ID NO: 28396 - RNA, 20 nt, Artificial Sequence
  spacer sequence CTCN PAM
ugaacggccagccaggagca

SEQ ID NO: 28397 - RNA, 20 nt, Artificial Sequence
  spacer sequence CTCN PAM
uggcuggccguucaggagcc

SEQ ID NO: 28398 - RNA, 20 nt, Artificial Sequence
  spacer sequence CTCN PAM
guggccggcuuugcuccugg

SEQ ID NO: 28399 - RNA, 20 nt, Artificial Sequence
  spacer sequence CTCN PAM
cguacucaguggccggcuuu

SEQ ID NO: 28400 - RNA, 20 nt, Artificial Sequence
  spacer sequence CTCN PAM
ggggacacgcucccacuccu

SEQ ID NO: 28401 - RNA, 20 nt, Artificial Sequence
  spacer sequence CTCN PAM
cacuccuuuuaggggcccag

SEQ ID NO: 28402 - RNA, 20 nt, Artificial Sequence
  spacer sequence CTCN PAM
uuuuaggggcccagaggcug

SEQ ID NO: 28403 - RNA, 20 nt, Artificial Sequence
  spacer sequence CTCN PAM
gggccccuaaaaggaguggg

SEQ ID NO: 28404 - RNA, 20 nt, Artificial Sequence
  spacer sequence CTCN PAM
uccacagccucugggccccu

SEQ ID NO: 28405 - RNA, 20 nt, Artificial Sequence
  spacer sequence CTCN PAM
ucauccacagccucugggcc

SEQ ID NO: 28406 - RNA, 20 nt, Artificial Sequence
  spacer sequence CTCN PAM
aguaucccccucucagugua

SEQ ID NO: 28407 - RNA, 20 nt, Artificial Sequence
  spacer sequence CTCN PAM
agcuccucauccacagccuc

SEQ ID NO: 28408 - RNA, 20 nt, Artificial Sequence
  spacer sequence CTCN PAM
caguguaaccuccccacccc

SEQ ID NO: 28409 - RNA, 20 nt, Artificial Sequence
  spacer sequence CTCN PAM
guguaaccuccccaccccuc

SEQ ID NO: 28410 - RNA, 20 nt, Artificial Sequence
  spacer sequence CTCN PAM
ccaccccucccacauccucc

SEQ ID NO: 28411 - RNA, 20 nt, Artificial Sequence
  spacer sequence CTCN PAM
cacauccuccaaguggggca

SEQ ID NO: 28412 - RNA, 20 nt, Artificial Sequence
  spacer sequence CTCN PAM
aaguggggcaggagccgccu

SEQ ID NO: 28413 - RNA, 20 nt, Artificial Sequence
  spacer sequence CTCN PAM
ugccccacuuggaggaugug

SEQ ID NO: 28414 - RNA, 20 nt, Artificial Sequence
  spacer sequence CTCN PAM
ccagagcugggggagggggc

SEQ ID NO: 28415 - RNA, 20 nt, Artificial Sequence
  spacer sequence CTCN PAM
ggugaggcggcuccugcccc

SEQ ID NO: 28416 - RNA, 20 nt, Artificial Sequence
  spacer sequence CTCN PAM
cccagcucuggugaggcggc

SEQ ID NO: 28417 - RNA, 20 nt, Artificial Sequence
  spacer sequence CTCN PAM
ccaggggugcaccugugugg

SEQ ID NO: 28418 - RNA, 20 nt, Artificial Sequence
  spacer sequence CTCN PAM
gcugccccuccccaggggug

SEQ ID NO: 28419 - RNA, 20 nt, Artificial Sequence
  spacer sequence CTCN PAM
ugaaaaaccagaugaucuag

SEQ ID NO: 28420 - RNA, 20 nt, Artificial Sequence
  spacer sequence CTCN PAM
aacgcagacuuguggcuucu

SEQ ID NO: 28421 - RNA, 20 nt, Artificial Sequence
  spacer sequence CTCN PAM
gggccaccccgagagcuccu

SEQ ID NO: 28422 - RNA, 20 nt, Artificial Sequence
  spacer sequence CTCN PAM
ggguggcccugaggucuggg

SEQ ID NO: 28423 - RNA, 20 nt, Artificial Sequence
  spacer sequence CTCN PAM
cgggguggcccugaggucug

SEQ ID NO: 28424 - RNA, 20 nt, Artificial Sequence
  spacer sequence CTCN PAM
ugcauccaccugggggcucg

SEQ ID NO: 28425 - RNA, 20 nt, Artificial Sequence
  spacer sequence CTCN PAM
cagcucccccaagcuccugg

SEQ ID NO: 28426 - RNA, 20 nt, Artificial Sequence
  spacer sequence CTCN PAM
cccaagcuccuggcggguag

SEQ ID NO: 28427 - RNA, 20 nt, Artificial Sequence
  spacer sequence CTCN PAM
uggcggguagcagucauucc

SEQ ID NO: 28428 - RNA, 20 nt, Artificial Sequence
  spacer sequence CTCN PAM
accagggccccagcgcccag

SEQ ID NO: 28429 - RNA, 20 nt, Artificial Sequence
  spacer sequence CTCN PAM
gcugggcgcuggggcccugg

SEQ ID NO: 28430 - RNA, 20 nt, Artificial Sequence
  spacer sequence CTCN PAM
cucagcugggcgcuggggcc

SEQ ID NO: 28431 - RNA, 20 nt, Artificial Sequence
  spacer sequence CTCN PAM
gggcggcaucacugugacca

SEQ ID NO: 28432 - RNA, 20 nt, Artificial Sequence
  spacer sequence CTCN PAM
ucaccgucccccguggccuu

SEQ ID NO: 28433 - RNA, 20 nt, Artificial Sequence
  spacer sequence CTCN PAM
ccgucccccguggccuugga

SEQ ID NO: 28434 - RNA, 20 nt, Artificial Sequence
  spacer sequence CTCN PAM
cacccauggguuccaggcac

SEQ ID NO: 28435 - RNA, 20 nt, Artificial Sequence
  spacer sequence CTCN PAM
cacagcguagggaggcugcg

SEQ ID NO: 28436 - RNA, 20 nt, Artificial Sequence
  spacer sequence CTCN PAM
cagcguagggaggcugcggu

SEQ ID NO: 28437 - RNA, 20 nt, Artificial Sequence
  spacer sequence CTCN PAM
cuacgcugugagagggccag

SEQ ID NO: 28438 - RNA, 20 nt, Artificial Sequence
  spacer sequence CTCN PAM
ccgccuggcuuccggugccc

SEQ ID NO: 28439 - RNA, 20 nt, Artificial Sequence
  spacer sequence CTCN PAM
ggggucugcugcgcucgccg

SEQ ID NO: 28440 - RNA, 20 nt, Artificial Sequence
  spacer sequence CTCN PAM
guuuaccugacaugcaaagg

SEQ ID NO: 28441 - RNA, 20 nt, Artificial Sequence
  spacer sequence CTCN PAM
ucacuccaggcuggacgggc

SEQ ID NO: 28442 - RNA, 20 nt, Artificial Sequence
  spacer sequence CTCN PAM
cuccaggcuggacgggcagc

SEQ ID NO: 28443 - RNA, 20 nt, Artificial Sequence
  spacer sequence CTCN PAM
aggcuggacgggcagccgac

SEQ ID NO: 28444 - RNA, 20 nt, Artificial Sequence
  spacer sequence CTCN PAM
gugacccucccuggcugccc

SEQ ID NO: 28445 - RNA, 20 nt, Artificial Sequence
  spacer sequence CTCN PAM
cuggcugccccuccccagca

SEQ ID NO: 28446 - RNA, 20 nt, Artificial Sequence
  spacer sequence CTCN PAM
ccagcaagugagucaguucc

SEQ ID NO: 28447 - RNA, 20 nt, Artificial Sequence
  spacer sequence CTCN PAM
cuugcuggggaggggcagcc

SEQ ID NO: 28448 - RNA, 20 nt, Artificial Sequence
  spacer sequence CTCN PAM
ccggcucccccuccccacgc

SEQ ID NO: 28449 - RNA, 20 nt, Artificial Sequence
  spacer sequence CTCN PAM
cccuccccacgccccagcac

SEQ ID NO: 28450 - RNA, 20 nt, Artificial Sequence
  spacer sequence CTCN PAM
ccacgccccagcacccaggg

SEQ ID NO: 28451 - RNA, 20 nt, Artificial Sequence
  spacer sequence CTCN PAM
uggggccaaggcccugggug

SEQ ID NO: 28452 - RNA, 20 nt, Artificial Sequence
  spacer sequence CTCN PAM
gccgcugugggcuccugggg

SEQ ID NO: 28453 - RNA, 20 nt, Artificial Sequence
  spacer sequence CTCN PAM
caggaaacgcgagugagccg

SEQ ID NO: 28454 - RNA, 20 nt, Artificial Sequence
  spacer sequence CTCN PAM
cguuuccugggagucucugc

SEQ ID NO: 28455 - RNA, 20 nt, Artificial Sequence
  spacer sequence CTCN PAM
cucgcguuuccugggagucu

SEQ ID NO: 28456 - RNA, 20 nt, Artificial Sequence
  spacer sequence CTCN PAM
uucgguuucacuuggacgcu

SEQ ID NO: 28457 - RNA, 20 nt, Artificial Sequence
  spacer sequence CTCN PAM
auccccagcaagaacaagcg

SEQ ID NO: 28458 - RNA, 20 nt, Artificial Sequence
  spacer sequence CTCN PAM
gggaagcacgggcacgaguc

SEQ ID NO: 28459 - RNA, 20 nt, Artificial Sequence
  spacer sequence CTCN PAM
ugcccgugcuucccggagcc

SEQ ID NO: 28460 - RNA, 20 nt, Artificial Sequence
  spacer sequence CTCN PAM
gugaccugcuuugugacucg

SEQ ID NO: 28461 - RNA, 20 nt, Artificial Sequence
  spacer sequence CTCN PAM
caugcccugcacugcacgag

SEQ ID NO: 28462 - RNA, 20 nt, Artificial Sequence
  spacer sequence CTCN PAM
ugcagugcagggcaugggag

SEQ ID NO: 28463 - RNA, 20 nt, Artificial Sequence
  spacer sequence CTCN PAM
ccugcaggcacugucccggg

SEQ ID NO: 28464 - RNA, 20 nt, Artificial Sequence
  spacer sequence CTCN PAM
gcaaugacucucugggcccc

SEQ ID NO: 28465 - RNA, 20 nt, Artificial Sequence
  spacer sequence CTCN PAM
cugggccccuccucccaccc

SEQ ID NO: 28466 - RNA, 20 nt, Artificial Sequence
  spacer sequence CTCN PAM
gggccccuccucccacccca

SEQ ID NO: 28467 - RNA, 20 nt, Artificial Sequence
  spacer sequence CTCN PAM
ucccaccccaucacucaugg

SEQ ID NO: 28468 - RNA, 20 nt, Artificial Sequence
  spacer sequence CTCN PAM
caccccaucacucauggggu

SEQ ID NO: 28469 - RNA, 20 nt, Artificial Sequence
  spacer sequence CTCN PAM
ugggguuguccagggcaaga

SEQ ID NO: 28470 - RNA, 20 nt, Artificial Sequence
  spacer sequence CTCN PAM
ugcccuggacaaccccauga

SEQ ID NO: 28471 - RNA, 20 nt, Artificial Sequence
  spacer sequence CTCN PAM
ugcggauuccccugggccuc

SEQ ID NO: 28472 - RNA, 20 nt, Artificial Sequence
  spacer sequence CTCN PAM
ccugcggauuccccugggcc

SEQ ID NO: 28473 - RNA, 20 nt, Artificial Sequence
  spacer sequence CTCN PAM
ugcccugugcccuggcucuc

SEQ ID NO: 28474 - RNA, 20 nt, Artificial Sequence
  spacer sequence CTCN PAM
gccuggggccgcacucgugc

SEQ ID NO: 28475 - RNA, 20 nt, Artificial Sequence
  spacer sequence CTCN PAM
gugggacugagcuucagggc

SEQ ID NO: 28476 - RNA, 20 nt, Artificial Sequence
  spacer sequence CTCN PAM
gucccacggaggccucagcc

SEQ ID NO: 28477 - RNA, 20 nt, Artificial Sequence
  spacer sequence CTCN PAM
gcauggcagcguggcccuga

SEQ ID NO: 28478 - RNA, 20 nt, Artificial Sequence
  spacer sequence CTCN PAM
cacggggccuccgccuggac

SEQ ID NO: 28479 - RNA, 20 nt, Artificial Sequence
  spacer sequence CTCN PAM
cggggccuccgccuggacca

SEQ ID NO: 28480 - RNA, 20 nt, Artificial Sequence
  spacer sequence CTCN PAM
gccuggaccaccaggcaccc

SEQ ID NO: 28481 - RNA, 20 nt, Artificial Sequence
  spacer sequence CTCN PAM
ggcugacuggccccugugug

SEQ ID NO: 28482 - RNA, 20 nt, Artificial Sequence
  spacer sequence CTCN PAM
ugccaagagccccguagggc

SEQ ID NO: 28483 - RNA, 20 nt, Artificial Sequence
  spacer sequence CTCN PAM
uggcaugagggggacaggcc

SEQ ID NO: 28484 - RNA, 20 nt, Artificial Sequence
  spacer sequence CTCN PAM
aaggggcccuacggggcucu

SEQ ID NO: 28485 - RNA, 20 nt, Artificial Sequence
  spacer sequence CTCN PAM
gaagcagugagugguucagg

SEQ ID NO: 28486 - RNA, 20 nt, Artificial Sequence
  spacer sequence CTCN PAM
cugcuucggaggggcaggga

SEQ ID NO: 28487 - RNA, 20 nt, Artificial Sequence
  spacer sequence CTCN PAM
gccccugaaccacucacugc

SEQ ID NO: 28488 - RNA, 20 nt, Artificial Sequence
  spacer sequence CTCN PAM
cccaggcccagcucugcccc

SEQ ID NO: 28489 - RNA, 20 nt, Artificial Sequence
  spacer sequence CTCN PAM
acccguaggacggcaacagu

SEQ ID NO: 28490 - RNA, 20 nt, Artificial Sequence
  spacer sequence CTCN PAM
acccuguggugacaacuggg

SEQ ID NO: 28491 - RNA, 20 nt, Artificial Sequence
  spacer sequence CTCN PAM
cuguccuucggaauccccag

SEQ ID NO: 28492 - RNA, 20 nt, Artificial Sequence
  spacer sequence CTCN PAM
gggaaaauaaaaguguuuaa

SEQ ID NO: 28493 - RNA, 20 nt, Artificial Sequence
  spacer sequence CTCN PAM
ugguguggauuguaucucag

SEQ ID NO: 28494 - RNA, 20 nt, Artificial Sequence
  spacer sequence CTCN PAM
ggacaggugccccuccuggu

SEQ ID NO: 28495 - RNA, 20 nt, Artificial Sequence
  spacer sequence CTCN PAM
acgguuucaacguauucuaa

SEQ ID NO: 28496 - RNA, 20 nt, Artificial Sequence
  spacer sequence CTCN PAM
cccaaaacacagccgugucc

SEQ ID NO: 28497 - RNA, 20 nt, Artificial Sequence
  spacer sequence CTCN PAM
cccgccucuacagccccugc

SEQ ID NO: 28498 - RNA, 20 nt, Artificial Sequence
  spacer sequence CTCN PAM
acagccccugcaaccacacg

SEQ ID NO: 28499 - RNA, 20 nt, Artificial Sequence
  spacer sequence CTCN PAM
ucuguggacuggccugcucu

SEQ ID NO: 28500 - RNA, 20 nt, Artificial Sequence
  spacer sequence CTCN PAM
ggacacgugaccacacgucu

SEQ ID NO: 28501 - RNA, 20 nt, Artificial Sequence
  spacer sequence CTCN PAM
gcacacgucacaugaacgga

SEQ ID NO: 28502 - RNA, 20 nt, Artificial Sequence
  spacer sequence CTCN PAM
guucaugugacgugugcaga

SEQ ID NO: 28503 - RNA, 20 nt, Artificial Sequence
  spacer sequence CTCN PAM
ccgcaagcacgucuccgcag

SEQ ID NO: 28504 - RNA, 20 nt, Artificial Sequence
  spacer sequence CTCN PAM
gcaagcacgucuccgcagag

SEQ ID NO: 28505 - RNA, 20 nt, Artificial Sequence
  spacer sequence CTCN PAM
gcagagcauccaugccgggc

SEQ ID NO: 28506 - RNA, 20 nt, Artificial Sequence
  spacer sequence CTCN PAM
gcggagacgugcuugcggag

SEQ ID NO: 28507 - RNA, 20 nt, Artificial Sequence
  spacer sequence CTCN PAM
gccuccucacggggcccagg

SEQ ID NO: 28508 - RNA, 20 nt, Artificial Sequence
  spacer sequence CTCN PAM
ucacggggcccaggaggccc

SEQ ID NO: 28509 - RNA, 20 nt, Artificial Sequence
  spacer sequence CTCN PAM
cggggcccaggaggcccagg

SEQ ID NO: 28510 - RNA, 20 nt, Artificial Sequence
  spacer sequence CTCN PAM
ugggccccgugaggaggcgg

SEQ ID NO: 28511 - RNA, 20 nt, Artificial Sequence
  spacer sequence CTCN PAM
cccugggccuccugggcccc

SEQ ID NO: 28512 - RNA, 20 nt, Artificial Sequence
  spacer sequence CTCN PAM
cgcccugggccuccugggcc

SEQ ID NO: 28513 - RNA, 20 nt, Artificial Sequence
  spacer sequence CTCN PAM
gcccugcgggcgaaggcaaa

SEQ ID NO: 28514 - RNA, 20 nt, Artificial Sequence
  spacer sequence CTCN PAM
ccugaguccugggcccugug

SEQ ID NO: 28515 - RNA, 20 nt, Artificial Sequence
  spacer sequence CTCN PAM
ugaguccugggcccugugac

SEQ ID NO: 28516 - RNA, 20 nt, Artificial Sequence
  spacer sequence CTCN PAM
ggagagggcucagcccugcg

SEQ ID NO: 28517 - RNA, 20 nt, Artificial Sequence
  spacer sequence CTCN PAM
cagcagggaggcaaggugac

SEQ ID NO: 28518 - RNA, 20 nt, Artificial Sequence
  spacer sequence CTCN PAM
cugcugggagguguggucac

SEQ ID NO: 28519 - RNA, 20 nt, Artificial Sequence
  spacer sequence CTCN PAM
ucgucccagcccgagggugc

SEQ ID NO: 28520 - RNA, 20 nt, Artificial Sequence
  spacer sequence CTCN PAM
ggcugggacgaagagcagac

SEQ ID NO: 28521 - RNA, 20 nt, Artificial Sequence
  spacer sequence CTCN PAM
cggggguugggggcgagagu

SEQ ID NO: 28522 - RNA, 20 nt, Artificial Sequence
  spacer sequence CTCN PAM
cccccaacccccgggagguu

SEQ ID NO: 28523 - RNA, 20 nt, Artificial Sequence
  spacer sequence CTCN PAM
cgcccccaacccccgggagg

SEQ ID NO: 28524 - RNA, 20 nt, Artificial Sequence
  spacer sequence CTCN PAM
gcacucucgcccccaacccc

SEQ ID NO: 28525 - RNA, 20 nt, Artificial Sequence
  spacer sequence CTCN PAM
ccucugcacucucgccccca

SEQ ID NO: 28526 - RNA, 20 nt, Artificial Sequence
  spacer sequence CTCN PAM
gccuugccccucgccucugc

SEQ ID NO: 28527 - RNA, 20 nt, Artificial Sequence
  spacer sequence CTCN PAM
cagccuugccccucgccucu

SEQ ID NO: 28528 - RNA, 20 nt, Artificial Sequence
  spacer sequence CTCN PAM
uccuggccugcccgcugucc

SEQ ID NO: 28529 - RNA, 20 nt, Artificial Sequence
  spacer sequence CTCN PAM
cuuuuaggcuucaacccggc

SEQ ID NO: 28530 - RNA, 20 nt, Artificial Sequence
  spacer sequence CTCN PAM
ccgugugcugucugaccaca

SEQ ID NO: 28531 - RNA, 20 nt, Artificial Sequence
  spacer sequence CTCN PAM
gcuguggaaaaagugacugg

SEQ ID NO: 28532 - RNA, 20 nt, Artificial Sequence
  spacer sequence CTCN PAM
agucacuuuuuccacagccg

SEQ ID NO: 28533 - RNA, 20 nt, Artificial Sequence
  spacer sequence CTCN PAM
ugcaccccugcuugugcaug

SEQ ID NO: 28534 - RNA, 20 nt, Artificial Sequence
  spacer sequence CTCN PAM
ugcaaacguguacuuugugu

SEQ ID NO: 28535 - RNA, 20 nt, Artificial Sequence
  spacer sequence CTCN PAM
cacauguauuuugugugugu

SEQ ID NO: 28536 - RNA, 20 nt, Artificial Sequence
  spacer sequence CTCN PAM
uguguguguugccugugccc

SEQ ID NO: 28537 - RNA, 20 nt, Artificial Sequence
  spacer sequence CTCN PAM
uauguuguguguguguauuu

SEQ ID NO: 28538 - RNA, 20 nt, Artificial Sequence
  spacer sequence CTCN PAM
ugaacauggguacacacagg

SEQ ID NO: 28539 - RNA, 20 nt, Artificial Sequence
  spacer sequence CTCN PAM
uguguuucauacgcgugugu

SEQ ID NO: 28540 - RNA, 20 nt, Artificial Sequence
  spacer sequence CTCN PAM
ugugcauguguguguugcuc

SEQ ID NO: 28541 - RNA, 20 nt, Artificial Sequence
  spacer sequence CTCN PAM
gcauguguguguacacgugu

SEQ ID NO: 28542 - RNA, 20 nt, Artificial Sequence
  spacer sequence CTCN PAM
acaccgccuccaggaguguu

SEQ ID NO: 28543 - RNA, 20 nt, Artificial Sequence
  spacer sequence CTCN PAM
aggaguguuuacagcugugg

SEQ ID NO: 28544 - RNA, 20 nt, Artificial Sequence
  spacer sequence CTCN PAM
uggaggcgguguggaggcag

SEQ ID NO: 28545 - RNA, 20 nt, Artificial Sequence
  spacer sequence CTCN PAM
gggaagggggcgguaucaug

SEQ ID NO: 28546 - RNA, 20 nt, Artificial Sequence
  spacer sequence CTCN PAM
cagggggcccccaugcuggg

SEQ ID NO: 28547 - RNA, 20 nt, Artificial Sequence
  spacer sequence CTCN PAM
gggagccggacugguucugu

SEQ ID NO: 28548 - RNA, 20 nt, Artificial Sequence
  spacer sequence CTCN PAM
cagaggcccccucccagggg

SEQ ID NO: 28549 - RNA, 20 nt, Artificial Sequence
  spacer sequence CTCN PAM
uuguucggggcagagcucac

SEQ ID NO: 28550 - RNA, 20 nt, Artificial Sequence
  spacer sequence CTCN PAM
gccccgaacaaagaggcgac

SEQ ID NO: 28551 - RNA, 20 nt, Artificial Sequence
  spacer sequence CTCN PAM
cucuggcgguguuggcguuu

SEQ ID NO: 28552 - RNA, 20 nt, Artificial Sequence
  spacer sequence CTCN PAM
ggcgguguuggcguuuccgc

SEQ ID NO: 28553 - RNA, 20 nt, Artificial Sequence
  spacer sequence CTCN PAM
ggcagggcccaugcggaaac

SEQ ID NO: 28554 - RNA, 20 nt, Artificial Sequence
  spacer sequence CTCN PAM
gcuggagccggguugggcca

SEQ ID NO: 28555 - RNA, 20 nt, Artificial Sequence
  spacer sequence CTCN PAM
agcggagucacggaugcccc

SEQ ID NO: 28556 - RNA, 20 nt, Artificial Sequence
  spacer sequence CTCN PAM
caccccugggguugggggag

SEQ ID NO: 28557 - RNA, 20 nt, Artificial Sequence
  spacer sequence CTCN PAM
cccaaccccaggggugugag

SEQ ID NO: 28558 - RNA, 20 nt, Artificial Sequence
  spacer sequence CTCN PAM
cuccaccucgguuuccccgc

SEQ ID NO: 28559 - RNA, 20 nt, Artificial Sequence
  spacer sequence CTCN PAM
ccaccucgguuuccccgcca

SEQ ID NO: 28560 - RNA, 20 nt, Artificial Sequence
  spacer sequence CTCN PAM
accucgguuuccccgccagg

SEQ ID NO: 28561 - RNA, 20 nt, Artificial Sequence
  spacer sequence CTCN PAM
guuuccccgccaggugagag

SEQ ID NO: 28562 - RNA, 20 nt, Artificial Sequence
  spacer sequence CTCN PAM
ccuggcggggaaaccgaggu

SEQ ID NO: 28563 - RNA, 20 nt, Artificial Sequence
  spacer sequence CTCN PAM
caccuggcggggaaaccgag

SEQ ID NO: 28564 - RNA, 20 nt, Artificial Sequence
  spacer sequence CTCN PAM
agccgcgugaccaugggcag

SEQ ID NO: 28565 - RNA, 20 nt, Artificial Sequence
  spacer sequence CTCN PAM
ccuccgcaccugcacaccug

SEQ ID NO: 28566 - RNA, 20 nt, Artificial Sequence
  spacer sequence CTCN PAM
uccgcaccugcacaccuggg

SEQ ID NO: 28567 - RNA, 20 nt, Artificial Sequence
  spacer sequence CTCN PAM
gcaccugcacaccugggugc

SEQ ID NO: 28568 - RNA, 20 nt, Artificial Sequence
  spacer sequence CTCN PAM
ugucuagcccagacuccaaa

SEQ ID NO: 28569 - RNA, 20 nt, Artificial Sequence
  spacer sequence CTCN PAM
aaagccaaccaagagugaau

SEQ ID NO: 28570 - RNA, 20 nt, Artificial Sequence
  spacer sequence CTCN PAM
ugguuggcuuuggagucugg

SEQ ID NO: 28571 - RNA, 20 nt, Artificial Sequence
  spacer sequence CTCN PAM
guucauccauucacucuugg

SEQ ID NO: 28572 - RNA, 20 nt, Artificial Sequence
  spacer sequence CTCN PAM
ccguucauccauucacucuu

SEQ ID NO: 28573 - RNA, 20 nt, Artificial Sequence
  spacer sequence CTCN PAM
guuugcuuuggggucuggcc

SEQ ID NO: 28574 - RNA, 20 nt, Artificial Sequence
  spacer sequence CTCN PAM
caguuugcuuuggggucugg

SEQ ID NO: 28575 - RNA, 20 nt, Artificial Sequence
  spacer sequence CTCN PAM
uccauucacucucaguuugc

SEQ ID NO: 28576 - RNA, 20 nt, Artificial Sequence
  spacer sequence CTCN PAM
ugcugccucuucugugcucu

SEQ ID NO: 28577 - RNA, 20 nt, Artificial Sequence
  spacer sequence CTCN PAM
ucugugcucugacaggcucc

SEQ ID NO: 28578 - RNA, 20 nt, Artificial Sequence
  spacer sequence CTCN PAM
gacaggcucccucccccuga

SEQ ID NO: 28579 - RNA, 20 nt, Artificial Sequence
  spacer sequence CTCN PAM
cucccccugaaguccagccc

SEQ ID NO: 28580 - RNA, 20 nt, Artificial Sequence
  spacer sequence CTCN PAM
cccugaaguccagccccugc

SEQ ID NO: 28581 - RNA, 20 nt, Artificial Sequence
  spacer sequence CTCN PAM
acaccagggcccuccuggcu

SEQ ID NO: 28582 - RNA, 20 nt, Artificial Sequence
  spacer sequence CTCN PAM
uggcuccuggcagguguggg

SEQ ID NO: 28583 - RNA, 20 nt, Artificial Sequence
  spacer sequence CTCN PAM
uggcaggugugggcagaugu

SEQ ID NO: 28584 - RNA, 20 nt, Artificial Sequence
  spacer sequence CTCN PAM
gaguuaaacaaaagccuccu

SEQ ID NO: 28585 - RNA, 20 nt, Artificial Sequence
  spacer sequence CTCN PAM
gaggaucccggcagacaucu

SEQ ID NO: 28586 - RNA, 20 nt, Artificial Sequence
  spacer sequence CTCN PAM
ucccugugcucugaaaucac

SEQ ID NO: 28587 - RNA, 20 nt, Artificial Sequence
  spacer sequence CTCN PAM
cugugcucugaaaucacacu

SEQ ID NO: 28588 - RNA, 20 nt, Artificial Sequence
  spacer sequence CTCN PAM
gaaaucacacuccaggggcu

SEQ ID NO: 28589 - RNA, 20 nt, Artificial Sequence
  spacer sequence CTCN PAM
aggggcuggcaggcgccuuc

SEQ ID NO: 28590 - RNA, 20 nt, Artificial Sequence
  spacer sequence CTCN PAM
ccaaggacgagagccugccu

SEQ ID NO: 28591 - RNA, 20 nt, Artificial Sequence
  spacer sequence CTCN PAM
aaggacgagagccugccugc

SEQ ID NO: 28592 - RNA, 20 nt, Artificial Sequence
  spacer sequence CTCN PAM
uccuuggagagggaaggacu

SEQ ID NO: 28593 - RNA, 20 nt, Artificial Sequence
  spacer sequence CTCN PAM
cguccuuggagagggaagga

SEQ ID NO: 28594 - RNA, 20 nt, Artificial Sequence
  spacer sequence CTCN PAM
ucugccgucuccccugccgu

SEQ ID NO: 28595 - RNA, 20 nt, Artificial Sequence
  spacer sequence CTCN PAM
gccgucuccccugccguggg

SEQ ID NO: 28596 - RNA, 20 nt, Artificial Sequence
  spacer sequence CTCN PAM
ccugccgugggaggcccuga

SEQ ID NO: 28597 - RNA, 20 nt, Artificial Sequence
  spacer sequence CTCN PAM
cacggcaggggagacggcag

SEQ ID NO: 28598 - RNA, 20 nt, Artificial Sequence
  spacer sequence CTCN PAM
gggccucccacggcagggga

SEQ ID NO: 28599 - RNA, 20 nt, Artificial Sequence
  spacer sequence CTCN PAM
aucccacccaccaagggguc

SEQ ID NO: 28600 - RNA, 20 nt, Artificial Sequence
  spacer sequence CTCN PAM
aauucgcccuuucucggcaa

SEQ ID NO: 28601 - RNA, 20 nt, Artificial Sequence
  spacer sequence CTCN PAM
gcaagaacucugaagguggc

SEQ ID NO: 28602 - RNA, 20 nt, Artificial Sequence
  spacer sequence CTCN PAM
gaagguggcccggagcaggc

SEQ ID NO: 28603 - RNA, 20 nt, Artificial Sequence
  spacer sequence CTCN PAM
gggccaccuucagaguucuu

SEQ ID NO: 28604 - RNA, 20 nt, Artificial Sequence
  spacer sequence CTCN PAM
caguggccugcuccgggcca

SEQ ID NO: 28605 - RNA, 20 nt, Artificial Sequence
  spacer sequence CTCN PAM
ggccuucagggaucuggcug

SEQ ID NO: 28606 - RNA, 20 nt, Artificial Sequence
  spacer sequence CTCN PAM
cugggucccauguccccgcu

SEQ ID NO: 28607 - RNA, 20 nt, Artificial Sequence
  spacer sequence CTCN PAM
gggucccauguccccgcugc

SEQ ID NO: 28608 - RNA, 20 nt, Artificial Sequence
  spacer sequence CTCN PAM
ucuuccagggccgagucagg

SEQ ID NO: 28609 - RNA, 20 nt, Artificial Sequence
  spacer sequence CTCN PAM
uccagggccgagucagggag

SEQ ID NO: 28610 - RNA, 20 nt, Artificial Sequence
  spacer sequence CTCN PAM
gcccuggaagaggagcagcg

SEQ ID NO: 28611 - RNA, 20 nt, Artificial Sequence
  spacer sequence CTCN PAM
cugacucggcccuggaagag

SEQ ID NO: 28612 - RNA, 20 nt, Artificial Sequence
  spacer sequence CTCN PAM
cccugacucggcccuggaag

SEQ ID NO: 28613 - RNA, 20 nt, Artificial Sequence
  spacer sequence CTCN PAM
cugggaugucucucccugac

SEQ ID NO: 28614 - RNA, 20 nt, Artificial Sequence
  spacer sequence CTCN PAM
gucaggaagcagugccggcu

SEQ ID NO: 28615 - RNA, 20 nt, Artificial Sequence
  spacer sequence CTCN PAM
gggccagggcagccggcacu

SEQ ID NO: 28616 - RNA, 20 nt, Artificial Sequence
  spacer sequence CTCN PAM
uccuccgggccagggcagcc

SEQ ID NO: 28617 - RNA, 20 nt, Artificial Sequence
  spacer sequence CTCN PAM
gccccucccaugcucuucuc

SEQ ID NO: 28618 - RNA, 20 nt, Artificial Sequence
  spacer sequence CTCN PAM
caugcucuucucuugaaccu

SEQ ID NO: 28619 - RNA, 20 nt, Artificial Sequence
  spacer sequence CTCN PAM
ucucuugaaccucggcuucc

SEQ ID NO: 28620 - RNA, 20 nt, Artificial Sequence
  spacer sequence CTCN PAM
ugaaccucggcuuccucugc

SEQ ID NO: 28621 - RNA, 20 nt, Artificial Sequence
  spacer sequence CTCN PAM
gcuuccucugccccucugua

SEQ ID NO: 28622 - RNA, 20 nt, Artificial Sequence
  spacer sequence CTCN PAM
gccccucuguaaaacacuca

SEQ ID NO: 28623 - RNA, 20 nt, Artificial Sequence
  spacer sequence CTCN PAM
guaaaacacucacugcaacc

SEQ ID NO: 28624 - RNA, 20 nt, Artificial Sequence
  spacer sequence CTCN PAM
cugcaaccgccccccccgcc

SEQ ID NO: 28625 - RNA, 20 nt, Artificial Sequence
  spacer sequence CTCN PAM
gaggccgggcacucucgcug

SEQ ID NO: 28626 - RNA, 20 nt, Artificial Sequence
  spacer sequence CTCN PAM
gagcuggccugugcugaugc

SEQ ID NO: 28627 - RNA, 20 nt, Artificial Sequence
  spacer sequence CTCN PAM
cgcugacagggcgugcaaca

SEQ ID NO: 28628 - RNA, 20 nt, Artificial Sequence
  spacer sequence CTCN PAM
cugacagggcgugcaacaga

SEQ ID NO: 28629 - RNA, 20 nt, Artificial Sequence
  spacer sequence CTCN PAM
gaacguccuuccugccugug

SEQ ID NO: 28630 - RNA, 20 nt, Artificial Sequence
  spacer sequence CTCN PAM
ccuggcugcuucuucccgga

SEQ ID NO: 28631 - RNA, 20 nt, Artificial Sequence
  spacer sequence CTCN PAM
uaaauguguagccggggccu

SEQ ID NO: 28632 - RNA, 20 nt, Artificial Sequence
  spacer sequence CTCN PAM
cuggaugaacugauuaacau

SEQ ID NO: 28633 - RNA, 20 nt, Artificial Sequence
  spacer sequence CTCN PAM
agggacgccgggcacggaug

SEQ ID NO: 28634 - RNA, 20 nt, Artificial Sequence
  spacer sequence CTCN PAM
ccacaacgccugccccccac

SEQ ID NO: 28635 - RNA, 20 nt, Artificial Sequence
  spacer sequence CTCN PAM
acaacgccugccccccacgc

SEQ ID NO: 28636 - RNA, 20 nt, Artificial Sequence
  spacer sequence CTCN PAM
aggccccaccugccuuauuc

SEQ ID NO: 28637 - RNA, 20 nt, Artificial Sequence
  spacer sequence CTCN PAM
gggguggugggaagagugcc

SEQ ID NO: 28638 - RNA, 20 nt, Artificial Sequence
  spacer sequence CTCN PAM
ucccaccaccccagaguccc

SEQ ID NO: 28639 - RNA, 20 nt, Artificial Sequence
  spacer sequence CTCN PAM
ugguggguccugucccccgu

SEQ ID NO: 28640 - RNA, 20 nt, Artificial Sequence
  spacer sequence CTCN PAM
cgggccccacucgggccauc

SEQ ID NO: 28641 - RNA, 20 nt, Artificial Sequence
  spacer sequence CTCN PAM
ggccaucucagcccgcuacc

SEQ ID NO: 28642 - RNA, 20 nt, Artificial Sequence
  spacer sequence CTCN PAM
gcccgcuacccucccucccg

SEQ ID NO: 28643 - RNA, 20 nt, Artificial Sequence
  spacer sequence CTCN PAM
cucccgccugucccuggaag

SEQ ID NO: 28644 - RNA, 20 nt, Artificial Sequence
  spacer sequence CTCN PAM
cgccugucccuggaagccgg

SEQ ID NO: 28645 - RNA, 20 nt, Artificial Sequence
  spacer sequence CTCN PAM
cacccccaacacgcucugca

SEQ ID NO: 28646 - RNA, 20 nt, Artificial Sequence
  spacer sequence CTCN PAM
gcagacuccgcccagacggc

SEQ ID NO: 28647 - RNA, 20 nt, Artificial Sequence
  spacer sequence CTCN PAM
gcccagacggccccgggguc

SEQ ID NO: 28648 - RNA, 20 nt, Artificial Sequence
  spacer sequence CTCN PAM
augcagaaaccgaaaaacca

SEQ ID NO: 28649 - RNA, 20 nt, Artificial Sequence
  spacer sequence CTCN PAM
ucuggggcagaugguuuuuc

SEQ ID NO: 28650 - RNA, 20 nt, Artificial Sequence
  spacer sequence CTCN PAM
gacuucucuucuggggcaga

SEQ ID NO: 28651 - RNA, 20 nt, Artificial Sequence
  spacer sequence CTCN PAM
uggggccuccgacuucucuu

SEQ ID NO: 28652 - RNA, 20 nt, Artificial Sequence
  spacer sequence CTCN PAM
cgcuccuggggccuccgacu

SEQ ID NO: 28653 - RNA, 20 nt, Artificial Sequence
  spacer sequence CTCN PAM
ccgccccucccgcuccuggg

SEQ ID NO: 28654 - RNA, 20 nt, Artificial Sequence
  spacer sequence CTCN PAM
ccuugcuccccgccccuccc

SEQ ID NO: 28655 - RNA, 20 nt, Artificial Sequence
  spacer sequence CTCN PAM
cuccccuugcuccccgcccc

SEQ ID NO: 28656 - RNA, 20 nt, Artificial Sequence
  spacer sequence CTCN PAM
cucccuccccuugcuccccg

SEQ ID NO: 28657 - RNA, 20 nt, Artificial Sequence
  spacer sequence CTCN PAM
gccccgcagcgcagcccugu

SEQ ID NO: 28658 - RNA, 20 nt, Artificial Sequence
  spacer sequence CTCN PAM
uuguccccggucccaggacc

SEQ ID NO: 28659 - RNA, 20 nt, Artificial Sequence
  spacer sequence CTCN PAM
uccuuguccccggucccagg

SEQ ID NO: 28660 - RNA, 20 nt, Artificial Sequence
  spacer sequence CTCN PAM
ggcguucgugccccuuccuc

SEQ ID NO: 28661 - RNA, 20 nt, Artificial Sequence
  spacer sequence CTCN PAM
ucgggcguucgugccccuuc

SEQ ID NO: 28662 - RNA, 20 nt, Artificial Sequence
  spacer sequence CTCN PAM
aggcuccucgggcguucgug

SEQ ID NO: 28663 - RNA, 20 nt, Artificial Sequence
  spacer sequence CTCN PAM
cgccgccccgauuccugacu

SEQ ID NO: 28664 - RNA, 20 nt, Artificial Sequence
  spacer sequence CTCN PAM
cccgccgccccgauuccuga

SEQ ID NO: 28665 - RNA, 20 nt, Artificial Sequence
  spacer sequence CTCN PAM
caggaaggggucgaggucac

SEQ ID NO: 28666 - RNA, 20 nt, Artificial Sequence
  spacer sequence CTCN PAM
accccuuccugggagugacc

SEQ ID NO: 28667 - RNA, 20 nt, Artificial Sequence
  spacer sequence CTCN PAM
ugaccucgaccccuuccugg

SEQ ID NO: 28668 - RNA, 20 nt, Artificial Sequence
  spacer sequence CTCN PAM
augcgccucgugaccucgac

SEQ ID NO: 28669 - RNA, 20 nt, Artificial Sequence
  spacer sequence CTCN PAM
acuccaugcgccucgugacc

SEQ ID NO: 28670 - RNA, 20 nt, Artificial Sequence
  spacer sequence CTCN PAM
cgacuccaugcgccucguga

SEQ ID NO: 28671 - RNA, 20 nt, Artificial Sequence
  spacer sequence CTCN PAM
guauccuggccuucccuuuu

SEQ ID NO: 28672 - RNA, 20 nt, Artificial Sequence
  spacer sequence CTCN PAM
ggggcaccgaugagugcggg

SEQ ID NO: 28673 - RNA, 20 nt, Artificial Sequence
  spacer sequence CTCN PAM
ucggugcccccgagccccuu

SEQ ID NO: 28674 - RNA, 20 nt, Artificial Sequence
  spacer sequence CTCN PAM
cuguaccgcgcagcuuggug

SEQ ID NO: 28675 - RNA, 20 nt, Artificial Sequence
  spacer sequence CTCN PAM
uccgggugacucccuguacc

SEQ ID NO: 28676 - RNA, 20 nt, Artificial Sequence
  spacer sequence CTCN PAM
caaccuuuccuucccgcucu

SEQ ID NO: 28677 - RNA, 20 nt, Artificial Sequence
  spacer sequence CTCN PAM
gccgcgaccccuuccgaccc

SEQ ID NO: 28678 - RNA, 20 nt, Artificial Sequence
  spacer sequence CTCN PAM
cccccgccccacggccccca

SEQ ID NO: 28679 - RNA, 20 nt, Artificial Sequence
  spacer sequence CTCN PAM
ccgcggaccccugcgcccgg

SEQ ID NO: 28680 - RNA, 20 nt, Artificial Sequence
  spacer sequence CTCN PAM
accgcgaccccugccuggcc

SEQ ID NO: 28681 - RNA, 20 nt, Artificial Sequence
  spacer sequence CTCN PAM
gguugcgacccccgccccgg

SEQ ID NO: 28682 - RNA, 20 nt, Artificial Sequence
  spacer sequence CTCN PAM
ccucgggcccggguccggcc

SEQ ID NO: 28683 - RNA, 20 nt, Artificial Sequence
  spacer sequence CTCN PAM
ggcccggguccggccgggcg

SEQ ID NO: 28684 - RNA, 20 nt, Artificial Sequence
  spacer sequence CTCN PAM
gcgcccggccggacccgggc

SEQ ID NO: 28685 - RNA, 20 nt, Artificial Sequence
  spacer sequence CTCN PAM
gagccucgcagcugccgccg

SEQ ID NO: 28686 - RNA, 20 nt, Artificial Sequence
  spacer sequence CTCN PAM
gagaaacaggcgccgcgggc

SEQ ID NO: 28687 - RNA, 20 nt, Artificial Sequence
  spacer sequence CTCN PAM
cagcugccgccgcucacuuc

SEQ ID NO: 28688 - RNA, 20 nt, Artificial Sequence
  spacer sequence CTCN PAM
cuuccggguuucgggcgcca

SEQ ID NO: 28689 - RNA, 20 nt, Artificial Sequence
  spacer sequence CTCN PAM
accugcgggggcguggucuc

SEQ ID NO: 28690 - RNA, 20 nt, Artificial Sequence
  spacer sequence CTCN PAM
guucgggggcggggccaccu

SEQ ID NO: 28691 - RNA, 20 nt, Artificial Sequence
  spacer sequence CTCN PAM
agggauuggcuuggaaggug

SEQ ID NO: 28692 - RNA, 20 nt, Artificial Sequence
  spacer sequence CTCN PAM
uacggcucuggguucgaauc

SEQ ID NO: 28693 - RNA, 20 nt, Artificial Sequence
  spacer sequence CTCN PAM
ggguucgaaucccgcccugc

SEQ ID NO: 28694 - RNA, 20 nt, Artificial Sequence
  spacer sequence CTCN PAM
ugagaccccagcaugugcuu

SEQ ID NO: 28695 - RNA, 20 nt, Artificial Sequence
  spacer sequence CTCN PAM
agagaaccaggcagggcggg

SEQ ID NO: 28696 - RNA, 20 nt, Artificial Sequence
  spacer sequence CTCN PAM
ucaagccucaguuuccucuu

SEQ ID NO: 28697 - RNA, 20 nt, Artificial Sequence
  spacer sequence CTCN PAM
agccucaguuuccucuucug

SEQ ID NO: 28698 - RNA, 20 nt, Artificial Sequence
  spacer sequence CTCN PAM
guuuccucuucugcaccgug

SEQ ID NO: 28699 - RNA, 20 nt, Artificial Sequence
  spacer sequence CTCN PAM
ucugcaccgugcuggugaaa

SEQ ID NO: 28700 - RNA, 20 nt, Artificial Sequence
  spacer sequence CTCN PAM
uuccucagaacccccuccaa

SEQ ID NO: 28701 - RNA, 20 nt, Artificial Sequence
  spacer sequence CTCN PAM
gaacccccuccaagccucug

SEQ ID NO: 28702 - RNA, 20 nt, Artificial Sequence
  spacer sequence CTCN PAM
aagccucugcaugugccacg

SEQ ID NO: 28703 - RNA, 20 nt, Artificial Sequence
  spacer sequence CTCN PAM
gcaugugccacgucccccac

SEQ ID NO: 28704 - RNA, 20 nt, Artificial Sequence
  spacer sequence CTCN PAM
cucacccgagacuuuuaaac

SEQ ID NO: 28705 - RNA, 20 nt, Artificial Sequence
  spacer sequence CTCN PAM
cccgagacuuuuaaacugag

SEQ ID NO: 28706 - RNA, 20 nt, Artificial Sequence
  spacer sequence CTCN PAM
ggugagugagccccaguggg

SEQ ID NO: 28707 - RNA, 20 nt, Artificial Sequence
  spacer sequence CTCN PAM
guuuaaaagucucgggugag

SEQ ID NO: 28708 - RNA, 20 nt, Artificial Sequence
  spacer sequence CTCN PAM
cucaaaagcuacuaagacga

SEQ ID NO: 28709 - RNA, 20 nt, Artificial Sequence
  spacer sequence CTCN PAM
aaagcuacuaagacgaucac

SEQ ID NO: 28710 - RNA, 20 nt, Artificial Sequence
  spacer sequence CTCN PAM
cgccuguaaucgcagcacuu

SEQ ID NO: 28711 - RNA, 20 nt, Artificial Sequence
  spacer sequence CTCN PAM
aagugcugcgauuacaggcg

SEQ ID NO: 28712 - RNA, 20 nt, Artificial Sequence
  spacer sequence CTCN PAM
caaagugcugcgauuacagg

SEQ ID NO: 28713 - RNA, 20 nt, Artificial Sequence
  spacer sequence CTCN PAM
gccucucaaagugcugcgau

SEQ ID NO: 28714 - RNA, 20 nt, Artificial Sequence
  spacer sequence CTCN PAM
agugauccauccgccucagc

SEQ ID NO: 28715 - RNA, 20 nt, Artificial Sequence
  spacer sequence CTCN PAM
cgaccucaagugauccaucc

SEQ ID NO: 28716 - RNA, 20 nt, Artificial Sequence
  spacer sequence CTCN PAM
aacucccgaccucaagugau

SEQ ID NO: 28717 - RNA, 20 nt, Artificial Sequence
  spacer sequence CTCN PAM
acuaaauauacaaaaauuag

SEQ ID NO: 28718 - RNA, 20 nt, Artificial Sequence
  spacer sequence CTCN PAM
ggaggcugaggcaguaguau

SEQ ID NO: 28719 - RNA, 20 nt, Artificial Sequence
  spacer sequence CTCN PAM
ugaguagcugggauuacagg

SEQ ID NO: 28720 - RNA, 20 nt, Artificial Sequence
  spacer sequence CTCN PAM
gccuccugaguagcugggau

SEQ ID NO: 28721 - RNA, 20 nt, Artificial Sequence
  spacer sequence CTCN PAM
cagguucaagcgauacuacu

SEQ ID NO: 28722 - RNA, 20 nt, Artificial Sequence
  spacer sequence CTCN PAM
cugcaauaacuaccucccag

SEQ ID NO: 28723 - RNA, 20 nt, Artificial Sequence
  spacer sequence CTCN PAM
gcucacugcaauaacuaccu

SEQ ID NO: 28724 - RNA, 20 nt, Artificial Sequence
  spacer sequence CTCN PAM
agcccgggcaacagagugag

SEQ ID NO: 28725 - RNA, 20 nt, Artificial Sequence
  spacer sequence CTCN PAM
guugcccgggcuggagugca

SEQ ID NO: 28726 - RNA, 20 nt, Artificial Sequence
  spacer sequence CTCN PAM
cucuguugcccgggcuggag

SEQ ID NO: 28727 - RNA, 20 nt, Artificial Sequence
  spacer sequence CTCN PAM
aucucaaaaauaaauaaaua

SEQ ID NO: 28728 - RNA, 20 nt, Artificial Sequence
  spacer sequence CTCN PAM
aaaauaaauaaauaaauaac

SEQ ID NO: 28729 - RNA, 20 nt, Artificial Sequence
  spacer sequence CTCN PAM
gggccugucagacauacucu

SEQ ID NO: 28730 - RNA, 20 nt, Artificial Sequence
  spacer sequence CTCN PAM
cucacgaaaaguuaucucug

SEQ ID NO: 28731 - RNA, 20 nt, Artificial Sequence
  spacer sequence CTCN PAM
cacgaaaaguuaucucuguu

SEQ ID NO: 28732 - RNA, 20 nt, Artificial Sequence
  spacer sequence CTCN PAM
cgaaaaguuaucucuguuca

SEQ ID NO: 28733 - RNA, 20 nt, Artificial Sequence
  spacer sequence CTCN PAM
guucauuaaucucucucccu

SEQ ID NO: 28734 - RNA, 20 nt, Artificial Sequence
  spacer sequence CTCN PAM
cucccuaaccaaauacaguu

SEQ ID NO: 28735 - RNA, 20 nt, Artificial Sequence
  spacer sequence CTCN PAM
cccuaaccaaauacaguucu

SEQ ID NO: 28736 - RNA, 20 nt, Artificial Sequence
  spacer sequence CTCN PAM
cuaaccaaauacaguucugg

SEQ ID NO: 28737 - RNA, 20 nt, Artificial Sequence
  spacer sequence CTCN PAM
uggggguagccccugggacu

SEQ ID NO: 28738 - RNA, 20 nt, Artificial Sequence
  spacer sequence CTCN PAM
cuuggggguagccccuggga

SEQ ID NO: 28739 - RNA, 20 nt, Artificial Sequence
  spacer sequence CTCN PAM
ggcccccguggcccugccug

SEQ ID NO: 28740 - RNA, 20 nt, Artificial Sequence
  spacer sequence CTCN PAM
uccucucgguggcuguggug

SEQ ID NO: 28741 - RNA, 20 nt, Artificial Sequence
  spacer sequence CTCN PAM
ucucgguggcugugguggga

SEQ ID NO: 28742 - RNA, 20 nt, Artificial Sequence
  spacer sequence CTCN PAM
cgguggcuguggugggaggc

SEQ ID NO: 28743 - RNA, 20 nt, Artificial Sequence
  spacer sequence CTCN PAM
guggcuguggugggaggcug

SEQ ID NO: 28744 - RNA, 20 nt, Artificial Sequence
  spacer sequence CTCN PAM
caccacagccaccgagagga

SEQ ID NO: 28745 - RNA, 20 nt, Artificial Sequence
  spacer sequence CTCN PAM
ccacgcagggcagccuccca

SEQ ID NO: 28746 - RNA, 20 nt, Artificial Sequence
  spacer sequence CTCN PAM
agcuccccacgcagggcagc

SEQ ID NO: 28747 - RNA, 20 nt, Artificial Sequence
  spacer sequence CTCN PAM
gggcacuuuuccugugacuu

SEQ ID NO: 28748 - RNA, 20 nt, Artificial Sequence
  spacer sequence CTCN PAM
agucacaggaaaagugcccu

SEQ ID NO: 28749 - RNA, 20 nt, Artificial Sequence
  spacer sequence CTCN PAM
cacacuggaucugccuucac

SEQ ID NO: 28750 - RNA, 20 nt, Artificial Sequence
  spacer sequence CTCN PAM
ccagcccaauuucagccaug

SEQ ID NO: 28751 - RNA, 20 nt, Artificial Sequence
  spacer sequence CTCN PAM
cuggacccaagcagccacaa

SEQ ID NO: 28752 - RNA, 20 nt, Artificial Sequence
  spacer sequence CTCN PAM
ggcuuguggcugcuuggguc

SEQ ID NO: 28753 - RNA, 20 nt, Artificial Sequence
  spacer sequence CTCN PAM
gcccccauuccaacccccug

SEQ ID NO: 28754 - RNA, 20 nt, Artificial Sequence
  spacer sequence CTCN PAM
aguuucaggggguuggaaug

SEQ ID NO: 28755 - RNA, 20 nt, Artificial Sequence
  spacer sequence CTCN PAM
augacuuuguuaauucauuc

SEQ ID NO: 28756 - RNA, 20 nt, Artificial Sequence
  spacer sequence CTCN PAM
gugcuuggucaugagcuggg

SEQ ID NO: 28757 - RNA, 20 nt, Artificial Sequence
  spacer sequence CTCN PAM
ugaccaagcacagagcagca

SEQ ID NO: 28758 - RNA, 20 nt, Artificial Sequence
  spacer sequence CTCN PAM
cagaggacucagcugucugu

SEQ ID NO: 28759 - RNA, 20 nt, Artificial Sequence
  spacer sequence CTCN PAM
gugagacccuggguuuuccc

SEQ ID NO: 28760 - RNA, 20 nt, Artificial Sequence
  spacer sequence CTCN PAM
gcugucugucccaacaucag

SEQ ID NO: 28761 - RNA, 20 nt, Artificial Sequence
  spacer sequence CTCN PAM
ccuagaccaggggcuuucug

SEQ ID NO: 28762 - RNA, 20 nt, Artificial Sequence
  spacer sequence CTCN PAM
ccccuagaccaggggcuuuc

SEQ ID NO: 28763 - RNA, 20 nt, Artificial Sequence
  spacer sequence CTCN PAM
cuccccuagaccaggggcuu

SEQ ID NO: 28764 - RNA, 20 nt, Artificial Sequence
  spacer sequence CTCN PAM
aauaugcgggaucucuggga

SEQ ID NO: 28765 - RNA, 20 nt, Artificial Sequence
  spacer sequence CTCN PAM
gggaggguugaaaugucugc

SEQ ID NO: 28766 - RNA, 20 nt, Artificial Sequence
  spacer sequence CTCN PAM
cagagaucccgcauauugga

SEQ ID NO: 28767 - RNA, 20 nt, Artificial Sequence
  spacer sequence CTCN PAM
augaagcccuaggcagacau

SEQ ID NO: 28768 - RNA, 20 nt, Artificial Sequence
  spacer sequence CTCN PAM
ucagcaugcagcccucuaug

SEQ ID NO: 28769 - RNA, 20 nt, Artificial Sequence
  spacer sequence CTCN PAM
uacuugaacuucaaaacccc

SEQ ID NO: 28770 - RNA, 20 nt, Artificial Sequence
  spacer sequence CTCN PAM
ugucuaccugguacacuccu

SEQ ID NO: 28771 - RNA, 20 nt, Artificial Sequence
  spacer sequence CTCN PAM
cuaaaaaacugaggccaaaa

SEQ ID NO: 28772 - RNA, 20 nt, Artificial Sequence
  spacer sequence CTCN PAM
aaaaaacugaggccaaaagc

SEQ ID NO: 28773 - RNA, 20 nt, Artificial Sequence
  spacer sequence CTCN PAM
guuuuuuagagaggugcuaa

SEQ ID NO: 28774 - RNA, 20 nt, Artificial Sequence
  spacer sequence CTCN PAM
cgccuguaaucccagcacua

SEQ ID NO: 28775 - RNA, 20 nt, Artificial Sequence
  spacer sequence CTCN PAM
cguagugcugggauuacagg

SEQ ID NO: 28776 - RNA, 20 nt, Artificial Sequence
  spacer sequence CTCN PAM
gacucccguagugcugggau

SEQ ID NO: 28777 - RNA, 20 nt, Artificial Sequence
  spacer sequence CTCN PAM
ugccucagacucccguagug

SEQ ID NO: 28778 - RNA, 20 nt, Artificial Sequence
  spacer sequence CTCN PAM
gguguuccuccugccucaga

SEQ ID NO: 28779 - RNA, 20 nt, Artificial Sequence
  spacer sequence CTCN PAM
aaccgcugaccucagguguu

SEQ ID NO: 28780 - RNA, 20 nt, Artificial Sequence
  spacer sequence CTCN PAM
acuaaaaguacaaaaaaguu

SEQ ID NO: 28781 - RNA, 20 nt, Artificial Sequence
  spacer sequence CTCN PAM
cuaguagcugggaauacagg

SEQ ID NO: 28782 - RNA, 20 nt, Artificial Sequence
  spacer sequence CTCN PAM
gccucccuaguagcugggaa

SEQ ID NO: 28783 - RNA, 20 nt, Artificial Sequence
  spacer sequence CTCN PAM
ugccucagccucccuaguag

SEQ ID NO: 28784 - RNA, 20 nt, Artificial Sequence
  spacer sequence CTCN PAM
uggguucaagcgauucuccu

SEQ ID NO: 28785 - RNA, 20 nt, Artificial Sequence
  spacer sequence CTCN PAM
accuccuggguucaagcgau

SEQ ID NO: 28786 - RNA, 20 nt, Artificial Sequence
  spacer sequence CTCN PAM
cugcaaccucuaccuccugg

SEQ ID NO: 28787 - RNA, 20 nt, Artificial Sequence
  spacer sequence CTCN PAM
gcucacugcaaccucuaccu

SEQ ID NO: 28788 - RNA, 20 nt, Artificial Sequence
  spacer sequence CTCN PAM
agccugggcgauagagugag

SEQ ID NO: 28789 - RNA, 20 nt, Artificial Sequence
  spacer sequence CTCN PAM
aucgcccaggcuggagugca

SEQ ID NO: 28790 - RNA, 20 nt, Artificial Sequence
  spacer sequence CTCN PAM
cucuaucgcccaggcuggag

SEQ ID NO: 28791 - RNA, 20 nt, Artificial Sequence
  spacer sequence CTCN PAM
aaaaaacaaacaaacaaaaa

SEQ ID NO: 28792 - RNA, 20 nt, Artificial Sequence
  spacer sequence CTCN PAM
cgccuguaaucccaacacuu

SEQ ID NO: 28793 - RNA, 20 nt, Artificial Sequence
  spacer sequence CTCN PAM
caaaguguugggauuacagg

SEQ ID NO: 28794 - RNA, 20 nt, Artificial Sequence
  spacer sequence CTCN PAM
gccucccaaaguguugggau

SEQ ID NO: 28795 - RNA, 20 nt, Artificial Sequence
  spacer sequence CTCN PAM
acuaaaaauacaaaaauuag

SEQ ID NO: 28796 - RNA, 20 nt, Artificial Sequence
  spacer sequence CTCN PAM
ggaggcugaggcaggagaau

SEQ ID NO: 28797 - RNA, 20 nt, Artificial Sequence
  spacer sequence CTCN PAM
ugaguagucaggauuacagg

SEQ ID NO: 28798 - RNA, 20 nt, Artificial Sequence
  spacer sequence CTCN PAM
gccuccugaguagucaggau

SEQ ID NO: 28799 - RNA, 20 nt, Artificial Sequence
  spacer sequence CTCN PAM
ugccucagccuccugaguag

SEQ ID NO: 28800 - RNA, 20 nt, Artificial Sequence
  spacer sequence CTCN PAM
cagauucaagugauucuccu

SEQ ID NO: 28801 - RNA, 20 nt, Artificial Sequence
  spacer sequence CTCN PAM
gccucccagauucaagugau

SEQ ID NO: 28802 - RNA, 20 nt, Artificial Sequence
  spacer sequence CTCN PAM
cugcaaccuccgccucccag

SEQ ID NO: 28803 - RNA, 20 nt, Artificial Sequence
  spacer sequence CTCN PAM
gcucacugcaaccuccgccu

SEQ ID NO: 28804 - RNA, 20 nt, Artificial Sequence
  spacer sequence CTCN PAM
agccugggugacaugacaag

SEQ ID NO: 28805 - RNA, 20 nt, Artificial Sequence
  spacer sequence CTCN PAM
gacccagaaggcagaaguga

SEQ ID NO: 28806 - RNA, 20 nt, Artificial Sequence
  spacer sequence CTCN PAM
ggacauaucacuucugccuu

SEQ ID NO: 28807 - RNA, 20 nt, Artificial Sequence
  spacer sequence CTCN PAM
cucuggacauaucacuucug

SEQ ID NO: 28808 - RNA, 20 nt, Artificial Sequence
  spacer sequence CTCN PAM
uugggggucuccuuuaccca

SEQ ID NO: 28809 - RNA, 20 nt, Artificial Sequence
  spacer sequence CTCN PAM
uuuacccauggugacagaac

SEQ ID NO: 28810 - RNA, 20 nt, Artificial Sequence
  spacer sequence CTCN PAM
caacagguggacgccguucu

SEQ ID NO: 28811 - RNA, 20 nt, Artificial Sequence
  spacer sequence CTCN PAM
gagucccgcagagcagccgg

SEQ ID NO: 28812 - RNA, 20 nt, Artificial Sequence
  spacer sequence CTCN PAM
gaggaaaagcucacaacagg

SEQ ID NO: 28813 - RNA, 20 nt, Artificial Sequence
  spacer sequence CTCN PAM
gcgggacucugaggaaaagc

SEQ ID NO: 28814 - RNA, 20 nt, Artificial Sequence
  spacer sequence CTCN PAM
gucggguccggcugcucugc

SEQ ID NO: 28815 - RNA, 20 nt, Artificial Sequence
  spacer sequence CTCN PAM
acacugaaucucuuuuuuuu

SEQ ID NO: 28816 - RNA, 20 nt, Artificial Sequence
  spacer sequence CTCN PAM
uuuuuuuuuuuuuuuuuuug

SEQ ID NO: 28817 - RNA, 20 nt, Artificial Sequence
  spacer sequence CTCN PAM
gucccaaaaaaaaaaaaaaa

SEQ ID NO: 28818 - RNA, 20 nt, Artificial Sequence
  spacer sequence CTCN PAM
gucgcccaggcuggagugca

SEQ ID NO: 28819 - RNA, 20 nt, Artificial Sequence
  spacer sequence CTCN PAM
agccugggcgacagagccag

SEQ ID NO: 28820 - RNA, 20 nt, Artificial Sequence
  spacer sequence CTCN PAM
gcucacugcaagcuccaccu

SEQ ID NO: 28821 - RNA, 20 nt, Artificial Sequence
  spacer sequence CTCN PAM
cugcaagcuccaccucccag

SEQ ID NO: 28822 - RNA, 20 nt, Artificial Sequence
  spacer sequence CTCN PAM
accucccagguucaugccau

SEQ ID NO: 28823 - RNA, 20 nt, Artificial Sequence
  spacer sequence CTCN PAM
cagguucaugccauucuccu

SEQ ID NO: 28824 - RNA, 20 nt, Artificial Sequence
  spacer sequence CTCN PAM
ugccucagccuccugaguag

SEQ ID NO: 28825 - RNA, 20 nt, Artificial Sequence
  spacer sequence CTCN PAM
gccuccugaguagcugggac

SEQ ID NO: 28826 - RNA, 20 nt, Artificial Sequence
  spacer sequence CTCN PAM
ugaguagcugggacugcagg

SEQ ID NO: 28827 - RNA, 20 nt, Artificial Sequence
  spacer sequence CTCN PAM
ggaggcugaggcaggagaau

SEQ ID NO: 28828 - RNA, 20 nt, Artificial Sequence
  spacer sequence CTCN PAM
acuaaaaauacaaaaaauua

SEQ ID NO: 28829 - RNA, 20 nt, Artificial Sequence
  spacer sequence CTCN PAM
aucuccugaccucgugaucc

SEQ ID NO: 28830 - RNA, 20 nt, Artificial Sequence
  spacer sequence CTCN PAM
ugaccucgugauccgcccgc

SEQ ID NO: 28831 - RNA, 20 nt, Artificial Sequence
  spacer sequence CTCN PAM
ugauccgcccgccucggcca

SEQ ID NO: 28832 - RNA, 20 nt, Artificial Sequence
  spacer sequence CTCN PAM
gccacccaaagugcugggau

SEQ ID NO: 28833 - RNA, 20 nt, Artificial Sequence
  spacer sequence CTCN PAM
cgcccguaaucccagcacuu

SEQ ID NO: 28834 - RNA, 20 nt, Artificial Sequence
  spacer sequence CTCN PAM
uuuuuuuugagauggagucu

SEQ ID NO: 28835 - RNA, 20 nt, Artificial Sequence
  spacer sequence CTCN PAM
aaaaaaaggagauuuggccg

SEQ ID NO: 28836 - RNA, 20 nt, Artificial Sequence
  spacer sequence CTCN PAM
aucucaaaaaaaaggagauu

SEQ ID NO: 28837 - RNA, 20 nt, Artificial Sequence
  spacer sequence CTCN PAM
caggccggagugcaauggca

SEQ ID NO: 28838 - RNA, 20 nt, Artificial Sequence
  spacer sequence CTCN PAM
ggccugggagacacagcaag

SEQ ID NO: 28839 - RNA, 20 nt, Artificial Sequence
  spacer sequence CTCN PAM
gccucccgguuuuggcaaac

SEQ ID NO: 28840 - RNA, 20 nt, Artificial Sequence
  spacer sequence CTCN PAM
cgguuuuggcaaacugggug

SEQ ID NO: 28841 - RNA, 20 nt, Artificial Sequence
  spacer sequence CTCN PAM
ucucaacuuugagacuauuu

SEQ ID NO: 28842 - RNA, 20 nt, Artificial Sequence
  spacer sequence CTCN PAM
acuuugagacuauuuucucu

SEQ ID NO: 28843 - RNA, 20 nt, Artificial Sequence
  spacer sequence CTCN PAM
aaguugagaugagcacccag

SEQ ID NO: 28844 - RNA, 20 nt, Artificial Sequence
  spacer sequence CTCN PAM
uuuuuuugagauggaguuuc

SEQ ID NO: 28845 - RNA, 20 nt, Artificial Sequence
  spacer sequence CTCN PAM
aaaaaaagagaaaauagucu

SEQ ID NO: 28846 - RNA, 20 nt, Artificial Sequence
  spacer sequence CTCN PAM
aucucaaaaaaaagagaaaa

SEQ ID NO: 28847 - RNA, 20 nt, Artificial Sequence
  spacer sequence CTCN PAM
uguugcccaggcuggagugc

SEQ ID NO: 28848 - RNA, 20 nt, Artificial Sequence
  spacer sequence CTCN PAM
agccugggcaacaggaguga

SEQ ID NO: 28849 - RNA, 20 nt, Artificial Sequence
  spacer sequence CTCN PAM
uccuccccuguucaaguggu

SEQ ID NO: 28850 - RNA, 20 nt, Artificial Sequence
  spacer sequence CTCN PAM
uccccuguucaagugguuau

SEQ ID NO: 28851 - RNA, 20 nt, Artificial Sequence
  spacer sequence CTCN PAM
ccuguucaagugguuauccu

SEQ ID NO: 28852 - RNA, 20 nt, Artificial Sequence
  spacer sequence CTCN PAM
gccugccaaguagcugggau

SEQ ID NO: 28853 - RNA, 20 nt, Artificial Sequence
  spacer sequence CTCN PAM
auguuggucaggcuggucuc

SEQ ID NO: 28854 - RNA, 20 nt, Artificial Sequence
  spacer sequence CTCN PAM
aacuccugaccucaggugau

SEQ ID NO: 28855 - RNA, 20 nt, Artificial Sequence
  spacer sequence CTCN PAM
ugaccucaggugaucugccu

SEQ ID NO: 28856 - RNA, 20 nt, Artificial Sequence
  spacer sequence CTCN PAM
ggugaucugccugccucggc

SEQ ID NO: 28857 - RNA, 20 nt, Artificial Sequence
  spacer sequence CTCN PAM
gccucccaaagugcugggau

SEQ ID NO: 28858 - RNA, 20 nt, Artificial Sequence
  spacer sequence CTCN PAM
caaagugcugggauuacagg

SEQ ID NO: 28859 - RNA, 20 nt, Artificial Sequence
  spacer sequence CTCN PAM
ugccuguaaucccagcacuu

SEQ ID NO: 28860 - RNA, 20 nt, Artificial Sequence
  spacer sequence CTCN PAM
gccaggcacgguggcucaug

SEQ ID NO: 28861 - RNA, 20 nt, Artificial Sequence
  spacer sequence CTCN PAM
uuucacagcaaauugaacag

SEQ ID NO: 28862 - RNA, 20 nt, Artificial Sequence
  spacer sequence CTCN PAM
auuuaacugcuguucaauuu

SEQ ID NO: 28863 - RNA, 20 nt, Artificial Sequence
  spacer sequence CTCN PAM
cccuuccaaaucuuuagugc

SEQ ID NO: 28864 - RNA, 20 nt, Artificial Sequence
  spacer sequence CTCN PAM
aguccccaggcuggcuuccu

SEQ ID NO: 28865 - RNA, 20 nt, Artificial Sequence
  spacer sequence CTCN PAM
uuuccucccacacuggacca

SEQ ID NO: 28866 - RNA, 20 nt, Artificial Sequence
  spacer sequence CTCN PAM
cacacuggaccauccacaca

SEQ ID NO: 28867 - RNA, 20 nt, Artificial Sequence
  spacer sequence CTCN PAM
aaaguuguguggauggucca

SEQ ID NO: 28868 - RNA, 20 nt, Artificial Sequence
  spacer sequence CTCN PAM
gcgugaugcuuugcuguugc

SEQ ID NO: 28869 - RNA, 20 nt, Artificial Sequence
  spacer sequence CTCN PAM
gaaggucccggcgcucagcg

SEQ ID NO: 28870 - RNA, 20 nt, Artificial Sequence
  spacer sequence CTCN PAM
gggcuucgcccaccgccugc

SEQ ID NO: 28871 - RNA, 20 nt, Artificial Sequence
  spacer sequence CTCN PAM
cacagcggcccucuggggua

SEQ ID NO: 28872 - RNA, 20 nt, Artificial Sequence
  spacer sequence CTCN PAM
gggguagcgacugguauuac

SEQ ID NO: 28873 - RNA, 20 nt, Artificial Sequence
  spacer sequence CTCN PAM
ugaaaugcagguaauaccag

SEQ ID NO: 28874 - RNA, 20 nt, Artificial Sequence
  spacer sequence CTCN PAM
cucgugaaaugcagguaaua

SEQ ID NO: 28875 - RNA, 20 nt, Artificial Sequence
  spacer sequence CTCN PAM
guuuccucccucgugaaaug

SEQ ID NO: 28876 - RNA, 20 nt, Artificial Sequence
  spacer sequence CTCN PAM
gggcagcuucugaacaguuc

SEQ ID NO: 28877 - RNA, 20 nt, Artificial Sequence
  spacer sequence CTCN PAM
cuuggugaccucagggcagc

SEQ ID NO: 28878 - RNA, 20 nt, Artificial Sequence
  spacer sequence CTCN PAM
uccuagcucacuuggugacc

SEQ ID NO: 28879 - RNA, 20 nt, Artificial Sequence
  spacer sequence CTCN PAM
aucucugccacauccaccuc

SEQ ID NO: 28880 - RNA, 20 nt, Artificial Sequence
  spacer sequence CTCN PAM
gccacauccaccucgggaaa

SEQ ID NO: 28881 - RNA, 20 nt, Artificial Sequence
  spacer sequence CTCN PAM
ggaaaccacaaggucucgau

SEQ ID NO: 28882 - RNA, 20 nt, Artificial Sequence
  spacer sequence CTCN PAM
augggugauuuugccuaaag

SEQ ID NO: 28883 - RNA, 20 nt, Artificial Sequence
  spacer sequence CTCN PAM
gcaggcaggaaucugccaag

SEQ ID NO: 28884 - RNA, 20 nt, Artificial Sequence
  spacer sequence CTCN PAM
ggaaagcagcagggacacag

SEQ ID NO: 28885 - RNA, 20 nt, Artificial Sequence
  spacer sequence CTCN PAM
uggcccagccuggaguacag

SEQ ID NO: 28886 - RNA, 20 nt, Artificial Sequence
  spacer sequence CTCN PAM
aggcugggccaugagcccca

SEQ ID NO: 28887 - RNA, 20 nt, Artificial Sequence
  spacer sequence CTCN PAM
uugggucacacagcagauuc

SEQ ID NO: 28888 - RNA, 20 nt, Artificial Sequence
  spacer sequence CTCN PAM
ccuugggucacacagcagau

SEQ ID NO: 28889 - RNA, 20 nt, Artificial Sequence
  spacer sequence CTCN PAM
cugugccccgguuuucccac

SEQ ID NO: 28890 - RNA, 20 nt, Artificial Sequence
  spacer sequence CTCN PAM
gugccccgguuuucccaccu

SEQ ID NO: 28891 - RNA, 20 nt, Artificial Sequence
  spacer sequence CTCN PAM
ccauuuuauaggugggaaaa

SEQ ID NO: 28892 - RNA, 20 nt, Artificial Sequence
  spacer sequence CTCN PAM
caaagugcugggauuacagg

SEQ ID NO: 28893 - RNA, 20 nt, Artificial Sequence
  spacer sequence CTCN PAM
gccucccaaagugcugggau

SEQ ID NO: 28894 - RNA, 20 nt, Artificial Sequence
  spacer sequence CTCN PAM
ugaucuucccgucucagccu

SEQ ID NO: 28895 - RNA, 20 nt, Artificial Sequence
  spacer sequence CTCN PAM
ugaccucgugaucuucccgu

SEQ ID NO: 28896 - RNA, 20 nt, Artificial Sequence
  spacer sequence CTCN PAM
aucucuugaccucgugaucu

SEQ ID NO: 28897 - RNA, 20 nt, Artificial Sequence
  spacer sequence CTCN PAM
acuaaaaauacaaaaauaag

SEQ ID NO: 28898 - RNA, 20 nt, Artificial Sequence
  spacer sequence CTCN PAM
ggaggcugaggcaggagaau

SEQ ID NO: 28899 - RNA, 20 nt, Artificial Sequence
  spacer sequence CTCN PAM
ggagugguugggaccacagg

SEQ ID NO: 28900 - RNA, 20 nt, Artificial Sequence
  spacer sequence CTCN PAM
gccuccggagugguugggac

SEQ ID NO: 28901 - RNA, 20 nt, Artificial Sequence
  spacer sequence CTCN PAM
ugccucagccuccggagugg

SEQ ID NO: 28902 - RNA, 20 nt, Artificial Sequence
  spacer sequence CTCN PAM
cggguucaagcgauucuccu

SEQ ID NO: 28903 - RNA, 20 nt, Artificial Sequence
  spacer sequence CTCN PAM
gccucccggguucaagcgau

SEQ ID NO: 28904 - RNA, 20 nt, Artificial Sequence
  spacer sequence CTCN PAM
uugcaaccuccgccucccgg

SEQ ID NO: 28905 - RNA, 20 nt, Artificial Sequence
  spacer sequence CTCN PAM
gcucauugcaaccuccgccu

SEQ ID NO: 28906 - RNA, 20 nt, Artificial Sequence
  spacer sequence CTCN PAM
agccugggcaacagagcaag

SEQ ID NO: 28907 - RNA, 20 nt, Artificial Sequence
  spacer sequence CTCN PAM
guugcccaggcuggagugca

SEQ ID NO: 28908 - RNA, 20 nt, Artificial Sequence
  spacer sequence CTCN PAM
gucucaaaaaaaauaauaau

SEQ ID NO: 28909 - RNA, 20 nt, Artificial Sequence
  spacer sequence CTCN PAM
aaaaaaauaauaauaaugau

SEQ ID NO: 28910 - RNA, 20 nt, Artificial Sequence
  spacer sequence CTCN PAM
auggacagacagugccuaau

SEQ ID NO: 28911 - RNA, 20 nt, Artificial Sequence
  spacer sequence CTCN PAM
aaaaaaaaaaaaaaaagaau

SEQ ID NO: 28912 - RNA, 20 nt, Artificial Sequence
  spacer sequence CTCN PAM
agccugggugaaagggccag

SEQ ID NO: 28913 - RNA, 20 nt, Artificial Sequence
  spacer sequence CTCN PAM
ugccccugcacuccagccug

SEQ ID NO: 28914 - RNA, 20 nt, Artificial Sequence
  spacer sequence CTCN PAM
acuuagugcaaccccugccu

SEQ ID NO: 28915 - RNA, 20 nt, Artificial Sequence
  spacer sequence CTCN PAM
uggguccaagugauuaucuu

SEQ ID NO: 28916 - RNA, 20 nt, Artificial Sequence
  spacer sequence CTCN PAM
gccucccaaguagcugggau

SEQ ID NO: 28917 - RNA, 20 nt, Artificial Sequence
  spacer sequence CTCN PAM
caaguagcugggauuacagg

SEQ ID NO: 28918 - RNA, 20 nt, Artificial Sequence
  spacer sequence CTCN PAM
acugaaaauacaaaaauuag

SEQ ID NO: 28919 - RNA, 20 nt, Artificial Sequence
  spacer sequence CTCN PAM
agcucuugaccucgugaucc

SEQ ID NO: 28920 - RNA, 20 nt, Artificial Sequence
  spacer sequence CTCN PAM
agaccauccuggucaacaug

SEQ ID NO: 28921 - RNA, 20 nt, Artificial Sequence
  spacer sequence CTCN PAM
ugaccucgugauccgccugc

SEQ ID NO: 28922 - RNA, 20 nt, Artificial Sequence
  spacer sequence CTCN PAM
ugauccgccugccuuggccu

SEQ ID NO: 28923 - RNA, 20 nt, Artificial Sequence
  spacer sequence CTCN PAM
cauauugcugggauuccagg

SEQ ID NO: 28924 - RNA, 20 nt, Artificial Sequence
  spacer sequence CTCN PAM
agccuggaaucccagcaaua

SEQ ID NO: 28925 - RNA, 20 nt, Artificial Sequence
  spacer sequence CTCN PAM
gcccaguccauggcgucacu

SEQ ID NO: 28926 - RNA, 20 nt, Artificial Sequence
  spacer sequence CTCN PAM
uugaacauccacuucaguga

SEQ ID NO: 28927 - RNA, 20 nt, Artificial Sequence
  spacer sequence CTCN PAM
aacugcagcauucauccuua

SEQ ID NO: 28928 - RNA, 20 nt, Artificial Sequence
  spacer sequence CTCN PAM
ugaacuccaacugcagcauu

SEQ ID NO: 28929 - RNA, 20 nt, Artificial Sequence
  spacer sequence CTCN PAM
cuugaacuccaacugcagca

SEQ ID NO: 28930 - RNA, 20 nt, Artificial Sequence
  spacer sequence CTCN PAM
ucucuugaacuccaacugca

SEQ ID NO: 28931 - RNA, 20 nt, Artificial Sequence
  spacer sequence CTCN PAM
gcccaucuguggcgucaaaa

SEQ ID NO: 28932 - RNA, 20 nt, Artificial Sequence
  spacer sequence CTCN PAM
ccccaucucugcccaucugu

SEQ ID NO: 28933 - RNA, 20 nt, Artificial Sequence
  spacer sequence CTCN PAM
ccuggcucagacuuuggaag

SEQ ID NO: 28934 - RNA, 20 nt, Artificial Sequence
  spacer sequence CTCN PAM
uggcucagacuuuggaagcc

SEQ ID NO: 28935 - RNA, 20 nt, Artificial Sequence
  spacer sequence CTCN PAM
gacuuuggaagccgcccccc

SEQ ID NO: 28936 - RNA, 20 nt, Artificial Sequence
  spacer sequence CTCN PAM
ccuggggggcggcuuccaaa

SEQ ID NO: 28937 - RNA, 20 nt, Artificial Sequence
  spacer sequence CTCN PAM
acuggucagagguguggaua

SEQ ID NO: 28938 - RNA, 20 nt, Artificial Sequence
  spacer sequence CTCN PAM
gaccaguugagcgucucccc

SEQ ID NO: 28939 - RNA, 20 nt, Artificial Sequence
  spacer sequence CTCN PAM
agccugggcgacagggugau

SEQ ID NO: 28940 - RNA, 20 nt, Artificial Sequence
  spacer sequence CTCN PAM
gccugcugcgcucaagcaau

SEQ ID NO: 28941 - RNA, 20 nt, Artificial Sequence
  spacer sequence CTCN PAM
agcaauccuccccagucagc

SEQ ID NO: 28942 - RNA, 20 nt, Artificial Sequence
  spacer sequence CTCN PAM
ccagucagccuccuaaguag

SEQ ID NO: 28943 - RNA, 20 nt, Artificial Sequence
  spacer sequence CTCN PAM
uaaguagcugggacuacagg

SEQ ID NO: 28944 - RNA, 20 nt, Artificial Sequence
  spacer sequence CTCN PAM
auaaaaaguaaaaaaauugg

SEQ ID NO: 28945 - RNA, 20 nt, Artificial Sequence
  spacer sequence CTCN PAM
ugagcucaagcaguccuccc

SEQ ID NO: 28946 - RNA, 20 nt, Artificial Sequence
  spacer sequence CTCN PAM
ggaguucaagacuaaucugg

SEQ ID NO: 28947 - RNA, 20 nt, Artificial Sequence
  spacer sequence CTCN PAM
agcaguccucccaccuuggc

SEQ ID NO: 28948 - RNA, 20 nt, Artificial Sequence
  spacer sequence CTCN PAM
caccuuggccucccaaagug

SEQ ID NO: 28949 - RNA, 20 nt, Artificial Sequence
  spacer sequence CTCN PAM
caaagugcugggauuacagg

SEQ ID NO: 28950 - RNA, 20 nt, Artificial Sequence
  spacer sequence CTCN PAM
ugccuguaaucccagcacuu

SEQ ID NO: 28951 - RNA, 20 nt, Artificial Sequence
  spacer sequence CTCN PAM
cuuucuuucucucucucucu

SEQ ID NO: 28952 - RNA, 20 nt, Artificial Sequence
  spacer sequence CTCN PAM
uucuuucucucucucucucu

SEQ ID NO: 28953 - RNA, 20 nt, Artificial Sequence
  spacer sequence CTCN PAM
cucucucucuauuuccuucu

SEQ ID NO: 28954 - RNA, 20 nt, Artificial Sequence
  spacer sequence CTCN PAM
cucucucuauuuccuucuuu

SEQ ID NO: 28955 - RNA, 20 nt, Artificial Sequence
  spacer sequence CTCN PAM
cucucuauuuccuucuuucu

SEQ ID NO: 28956 - RNA, 20 nt, Artificial Sequence
  spacer sequence CTCN PAM
cucuauuuccuucuuucuuu

SEQ ID NO: 28957 - RNA, 20 nt, Artificial Sequence
  spacer sequence CTCN PAM
cuauuuccuucuuucuuucu

SEQ ID NO: 28958 - RNA, 20 nt, Artificial Sequence
  spacer sequence CTCN PAM
auuuccuucuuucuuucuuu

SEQ ID NO: 28959 - RNA, 20 nt, Artificial Sequence
  spacer sequence CTCN PAM
cucucucucuuucuuucucu

SEQ ID NO: 28960 - RNA, 20 nt, Artificial Sequence
  spacer sequence CTCN PAM
cucucucuuucuuucucucu

SEQ ID NO: 28961 - RNA, 20 nt, Artificial Sequence
  spacer sequence CTCN PAM
cucucuuucuuucucucucu

SEQ ID NO: 28962 - RNA, 20 nt, Artificial Sequence
  spacer sequence CTCN PAM
cucuuucuuucucucucucu

SEQ ID NO: 28963 - RNA, 20 nt, Artificial Sequence
  spacer sequence CTCN PAM
cuuucuuucucucucucuuu

SEQ ID NO: 28964 - RNA, 20 nt, Artificial Sequence
  spacer sequence CTCN PAM
uucuuucucucucucuuucu

SEQ ID NO: 28965 - RNA, 20 nt, Artificial Sequence
  spacer sequence CTCN PAM
cucucuuucuuucuuuuuuu

SEQ ID NO: 28966 - RNA, 20 nt, Artificial Sequence
  spacer sequence CTCN PAM
cucuuucuuucuuuuuuuug

SEQ ID NO: 28967 - RNA, 20 nt, Artificial Sequence
  spacer sequence CTCN PAM
cuuucuuucuuuuuuuugua

SEQ ID NO: 28968 - RNA, 20 nt, Artificial Sequence
  spacer sequence CTCN PAM
uucuuucuuuuuuuuguaga

SEQ ID NO: 28969 - RNA, 20 nt, Artificial Sequence
  spacer sequence CTCN PAM
acaaaaaaaagaaagaaaga

SEQ ID NO: 28970 - RNA, 20 nt, Artificial Sequence
  spacer sequence CTCN PAM
aacuccuggccucaagcaau

SEQ ID NO: 28971 - RNA, 20 nt, Artificial Sequence
  spacer sequence CTCN PAM
uggccucaagcaauccaccu

SEQ ID NO: 28972 - RNA, 20 nt, Artificial Sequence
  spacer sequence CTCN PAM
agcaauccaccugccucggc

SEQ ID NO: 28973 - RNA, 20 nt, Artificial Sequence
  spacer sequence CTCN PAM
gccucccaaaaugcuaggau

SEQ ID NO: 28974 - RNA, 20 nt, Artificial Sequence
  spacer sequence CTCN PAM
caaaaugcuaggauuacagg

SEQ ID NO: 28975 - RNA, 20 nt, Artificial Sequence
  spacer sequence CTCN PAM
ugccuguaauccuagcauuu

SEQ ID NO: 28976 - RNA, 20 nt, Artificial Sequence
  spacer sequence CTCN PAM
guccagccugucuuaauuau

SEQ ID NO: 28977 - RNA, 20 nt, Artificial Sequence
  spacer sequence CTCN PAM
guuuccccaucugggagaug

SEQ ID NO: 28978 - RNA, 20 nt, Artificial Sequence
  spacer sequence CTCN PAM
cagauggggaaacugaggca

SEQ ID NO: 28979 - RNA, 20 nt, Artificial Sequence
  spacer sequence CTCN PAM
cggccucagugucucuccug

SEQ ID NO: 28980 - RNA, 20 nt, Artificial Sequence
  spacer sequence CTCN PAM
gugucucuccugggcggcaa

SEQ ID NO: 28981 - RNA, 20 nt, Artificial Sequence
  spacer sequence CTCN PAM
ccugggcggcaagaaggacc

SEQ ID NO: 28982 - RNA, 20 nt, Artificial Sequence
  spacer sequence CTCN PAM
ugggcggcaagaaggacccu

SEQ ID NO: 28983 - RNA, 20 nt, Artificial Sequence
  spacer sequence CTCN PAM
gccguccagggggccgaggg

SEQ ID NO: 28984 - RNA, 20 nt, Artificial Sequence
  spacer sequence CTCN PAM
gcccccuggacggcagagug

SEQ ID NO: 28985 - RNA, 20 nt, Artificial Sequence
  spacer sequence CTCN PAM
cucggcccccuggacggcag

SEQ ID NO: 28986 - RNA, 20 nt, Artificial Sequence
  spacer sequence CTCN PAM
cugggcaccucccucggccc

SEQ ID NO: 28987 - RNA, 20 nt, Artificial Sequence
  spacer sequence CTCN PAM
cccucccugggcaccucccu

SEQ ID NO: 28988 - RNA, 20 nt, Artificial Sequence
  spacer sequence CTCN PAM
cgcacagagccucagaccug

SEQ ID NO: 28989 - RNA, 20 nt, Artificial Sequence
  spacer sequence CTCN PAM
gugcgggagccgcccgucac

SEQ ID NO: 28990 - RNA, 20 nt, Artificial Sequence
  spacer sequence CTCN PAM
gaccugggcaggugaggcag

SEQ ID NO: 28991 - RNA, 20 nt, Artificial Sequence
  spacer sequence CTCN PAM
ccugcccaggucugaggcuc

SEQ ID NO: 28992 - RNA, 20 nt, Artificial Sequence
  spacer sequence CTCN PAM
aucccaucccugcccccgca

SEQ ID NO: 28993 - RNA, 20 nt, Artificial Sequence
  spacer sequence CTCN PAM
acauucuggaaagucccugu

SEQ ID NO: 28994 - RNA, 20 nt, Artificial Sequence
  spacer sequence CTCN PAM
gccugggaacacagggacuu

SEQ ID NO: 28995 - RNA, 20 nt, Artificial Sequence
  spacer sequence CTCN PAM
ucccugccagcccuccuggg

SEQ ID NO: 28996 - RNA, 20 nt, Artificial Sequence
  spacer sequence CTCN PAM
cugccagcccuccugggcgc

SEQ ID NO: 28997 - RNA, 20 nt, Artificial Sequence
  spacer sequence CTCN PAM
ugggcgccgggcuccucacc

SEQ ID NO: 28998 - RNA, 20 nt, Artificial Sequence
  spacer sequence CTCN PAM
ucaccacuucuccuuccucc

SEQ ID NO: 28999 - RNA, 20 nt, Artificial Sequence
  spacer sequence CTCN PAM
ccacuucuccuuccuccacc

SEQ ID NO: 29000 - RNA, 20 nt, Artificial Sequence
  spacer sequence CTCN PAM
uuccuccacccacuucccca

SEQ ID NO: 29001 - RNA, 20 nt, Artificial Sequence
  spacer sequence CTCN PAM
acccacuuccccagcggacg

SEQ ID NO: 29002 - RNA, 20 nt, Artificial Sequence
  spacer sequence CTCN PAM
ugccucucuccucuuuucuu

SEQ ID NO: 29003 - RNA, 20 nt, Artificial Sequence
  spacer sequence CTCN PAM
cuccucuuuucuuucccaau

SEQ ID NO: 29004 - RNA, 20 nt, Artificial Sequence
  spacer sequence CTCN PAM
ccucuuuucuuucccaauca

SEQ ID NO: 29005 - RNA, 20 nt, Artificial Sequence
  spacer sequence CTCN PAM
ucuuuucuuucccaaucagg

SEQ ID NO: 29006 - RNA, 20 nt, Artificial Sequence
  spacer sequence CTCN PAM
uuucuuucccaaucaggccc

SEQ ID NO: 29007 - RNA, 20 nt, Artificial Sequence
  spacer sequence CTCN PAM
ugggucgggcaggcccagcu

SEQ ID NO: 29008 - RNA, 20 nt, Artificial Sequence
  spacer sequence CTCN PAM
gucugucucugucucugucu

SEQ ID NO: 29009 - RNA, 20 nt, Artificial Sequence
  spacer sequence CTCN PAM
gucucugucucuaucugucu

SEQ ID NO: 29010 - RNA, 20 nt, Artificial Sequence
  spacer sequence CTCN PAM
gucucuaucugucucucugu

SEQ ID NO: 29011 - RNA, 20 nt, Artificial Sequence
  spacer sequence CTCN PAM
aucugucucucugucucucu

SEQ ID NO: 29012 - RNA, 20 nt, Artificial Sequence
  spacer sequence CTCN PAM
cugucucucucugucucuuu

SEQ ID NO: 29013 - RNA, 20 nt, Artificial Sequence
  spacer sequence CTCN PAM
gucucucucugucucuuucu

SEQ ID NO: 29014 - RNA, 20 nt, Artificial Sequence
  spacer sequence CTCN PAM
cucugucucuuucucugucu

SEQ ID NO: 29015 - RNA, 20 nt, Artificial Sequence
  spacer sequence CTCN PAM
cugucucuuucucugucucc

SEQ ID NO: 29016 - RNA, 20 nt, Artificial Sequence
  spacer sequence CTCN PAM
gucucuuucucugucuccuu

SEQ ID NO: 29017 - RNA, 20 nt, Artificial Sequence
  spacer sequence CTCN PAM
uucucugucuccuugucugu

SEQ ID NO: 29018 - RNA, 20 nt, Artificial Sequence
  spacer sequence CTCN PAM
gucuccuugucugucugucu

SEQ ID NO: 29019 - RNA, 20 nt, Artificial Sequence
  spacer sequence CTCN PAM
uugucugucugucucucugu

SEQ ID NO: 29020 - RNA, 20 nt, Artificial Sequence
  spacer sequence CTCN PAM
cugucuccaugucucucugu

SEQ ID NO: 29021 - RNA, 20 nt, Artificial Sequence
  spacer sequence CTCN PAM
gucuccaugucucucugucu

SEQ ID NO: 29022 - RNA, 20 nt, Artificial Sequence
  spacer sequence CTCN PAM
augucucucugucucucugu

SEQ ID NO: 29023 - RNA, 20 nt, Artificial Sequence
  spacer sequence CTCN PAM
cugucucucugucuucgucu

SEQ ID NO: 29024 - RNA, 20 nt, Artificial Sequence
  spacer sequence CTCN PAM
gucucucugucuucgucucu

SEQ ID NO: 29025 - RNA, 20 nt, Artificial Sequence
  spacer sequence CTCN PAM
cugucuucgucucucuguuu

SEQ ID NO: 29026 - RNA, 20 nt, Artificial Sequence
  spacer sequence CTCN PAM
gucuucgucucucuguuucu

SEQ ID NO: 29027 - RNA, 20 nt, Artificial Sequence
  spacer sequence CTCN PAM
cuguuucuggcucucuuugu

SEQ ID NO: 29028 - RNA, 20 nt, Artificial Sequence
  spacer sequence CTCN PAM
guuucuggcucucuuugucu

SEQ ID NO: 29029 - RNA, 20 nt, Artificial Sequence
  spacer sequence CTCN PAM
cuuugucucucugugucuca

SEQ ID NO: 29030 - RNA, 20 nt, Artificial Sequence
  spacer sequence CTCN PAM
uugucucucugugucucagu

SEQ ID NO: 29031 - RNA, 20 nt, Artificial Sequence
  spacer sequence CTCN PAM
cugugucucaguuuauuucu

SEQ ID NO: 29032 - RNA, 20 nt, Artificial Sequence
  spacer sequence CTCN PAM
gugucucaguuuauuucugu

SEQ ID NO: 29033 - RNA, 20 nt, Artificial Sequence
  spacer sequence CTCN PAM
guuuauuucugucucuuucu

SEQ ID NO: 29034 - RNA, 20 nt, Artificial Sequence
  spacer sequence CTCN PAM
uucugugucucuuugucugu

SEQ ID NO: 29035 - RNA, 20 nt, Artificial Sequence
  spacer sequence CTCN PAM
uugucugugucucugugucc

SEQ ID NO: 29036 - RNA, 20 nt, Artificial Sequence
  spacer sequence CTCN PAM
gugucccucugucucuguuu

SEQ ID NO: 29037 - RNA, 20 nt, Artificial Sequence
  spacer sequence CTCN PAM
gucucuguuucucuggcucu

SEQ ID NO: 29038 - RNA, 20 nt, Artificial Sequence
  spacer sequence CTCN PAM
guuucucuggcucuggcucu

SEQ ID NO: 29039 - RNA, 20 nt, Artificial Sequence
  spacer sequence CTCN PAM
ggcucuggcucugugucccu

SEQ ID NO: 29040 - RNA, 20 nt, Artificial Sequence
  spacer sequence CTCN PAM
ggcucugugucccugucugu

SEQ ID NO: 29041 - RNA, 20 nt, Artificial Sequence
  spacer sequence CTCN PAM
gugucccugucuguuucuuu

SEQ ID NO: 29042 - RNA, 20 nt, Artificial Sequence
  spacer sequence CTCN PAM
aaaaaaaaaaaaaaaaaaaa

SEQ ID NO: 29043 - RNA, 20 nt, Artificial Sequence
  spacer sequence CTCN PAM
caaaaaaaaaaaaaaaaaaa

SEQ ID NO: 29044 - RNA, 20 nt, Artificial Sequence
  spacer sequence CTCN PAM
cucaaaaaaaaaaaaaaaaa

SEQ ID NO: 29045 - RNA, 20 nt, Artificial Sequence
  spacer sequence CTCN PAM
cucugucccccaggcugggg

SEQ ID NO: 29046 - RNA, 20 nt, Artificial Sequence
  spacer sequence CTCN PAM
gucccccaggcuggggugca

SEQ ID NO: 29047 - RNA, 20 nt, Artificial Sequence
  spacer sequence CTCN PAM
gcucacugcaagcuccgccu

SEQ ID NO: 29048 - RNA, 20 nt, Artificial Sequence
  spacer sequence CTCN PAM
cugcaagcuccgccucccgg

SEQ ID NO: 29049 - RNA, 20 nt, Artificial Sequence
  spacer sequence CTCN PAM
gccucccggguucacgccau

SEQ ID NO: 29050 - RNA, 20 nt, Artificial Sequence
  spacer sequence CTCN PAM
cggguucacgccauucuccu

SEQ ID NO: 29051 - RNA, 20 nt, Artificial Sequence
  spacer sequence CTCN PAM
ugccucagccucccaaguag

SEQ ID NO: 29052 - RNA, 20 nt, Artificial Sequence
  spacer sequence CTCN PAM
gccucccaaguagcugggag

SEQ ID NO: 29053 - RNA, 20 nt, Artificial Sequence
  spacer sequence CTCN PAM
caaguagcugggaguacagg

SEQ ID NO: 29054 - RNA, 20 nt, Artificial Sequence
  spacer sequence CTCN PAM
cagcuacuugggaggcugag

SEQ ID NO: 29055 - RNA, 20 nt, Artificial Sequence
  spacer sequence CTCN PAM
aucuccugaccucgugaucc

SEQ ID NO: 29056 - RNA, 20 nt, Artificial Sequence
  spacer sequence CTCN PAM
ugaccucgugauccgcccgc

SEQ ID NO: 29057 - RNA, 20 nt, Artificial Sequence
  spacer sequence CTCN PAM
ugauccgcccgccucagccu

SEQ ID NO: 29058 - RNA, 20 nt, Artificial Sequence
  spacer sequence CTCN PAM
gccucccaaagugcugggau

SEQ ID NO: 29059 - RNA, 20 nt, Artificial Sequence
  spacer sequence CTCN PAM
caaagugcugggauuacagg

SEQ ID NO: 29060 - RNA, 20 nt, Artificial Sequence
  spacer sequence CTCN PAM
cgccuguaaucccagcacuu

SEQ ID NO: 29061 - RNA, 20 nt, Artificial Sequence
  spacer sequence CTCN PAM
cggccugucucucuguuucu

SEQ ID NO: 29062 - RNA, 20 nt, Artificial Sequence
  spacer sequence CTCN PAM
cuguuucucugucucucucu

SEQ ID NO: 29063 - RNA, 20 nt, Artificial Sequence
  spacer sequence CTCN PAM
guuucucugucucucucuuu

SEQ ID NO: 29064 - RNA, 20 nt, Artificial Sequence
  spacer sequence CTCN PAM
gucucucucuuugucucugu

SEQ ID NO: 29065 - RNA, 20 nt, Artificial Sequence
  spacer sequence CTCN PAM
cucuuugucucugucucucu

SEQ ID NO: 29066 - RNA, 20 nt, Artificial Sequence
  spacer sequence CTCN PAM
cuuugucucugucucucugu

SEQ ID NO: 29067 - RNA, 20 nt, Artificial Sequence
  spacer sequence CTCN PAM
uugucucugucucucugucu

SEQ ID NO: 29068 - RNA, 20 nt, Artificial Sequence
  spacer sequence CTCN PAM
gucucucugucucugucucu

SEQ ID NO: 29069 - RNA, 20 nt, Artificial Sequence
  spacer sequence CTCN PAM
cugucucugucucugugucc

SEQ ID NO: 29070 - RNA, 20 nt, Artificial Sequence
  spacer sequence CTCN PAM
gucucugucucugugucccu

SEQ ID NO: 29071 - RNA, 20 nt, Artificial Sequence
  spacer sequence CTCN PAM
gucucugugucccucugucu

SEQ ID NO: 29072 - RNA, 20 nt, Artificial Sequence
  spacer sequence CTCN PAM
gugucccucugucucucugu

SEQ ID NO: 29073 - RNA, 20 nt, Artificial Sequence
  spacer sequence CTCN PAM
gucucucuguuugucucucu

SEQ ID NO: 29074 - RNA, 20 nt, Artificial Sequence
  spacer sequence CTCN PAM
cuguuugucucucucugugu

SEQ ID NO: 29075 - RNA, 20 nt, Artificial Sequence
  spacer sequence CTCN PAM
guuugucucucucugugucu

SEQ ID NO: 29076 - RNA, 20 nt, Artificial Sequence
  spacer sequence CTCN PAM
cucugugucugucucugucu

SEQ ID NO: 29077 - RNA, 20 nt, Artificial Sequence
  spacer sequence CTCN PAM
cugugucugucucugucucc

SEQ ID NO: 29078 - RNA, 20 nt, Artificial Sequence
  spacer sequence CTCN PAM
gugucugucucugucuccgu

SEQ ID NO: 29079 - RNA, 20 nt, Artificial Sequence
  spacer sequence CTCN PAM
gucuccgugucucucugucu

SEQ ID NO: 29080 - RNA, 20 nt, Artificial Sequence
  spacer sequence CTCN PAM
gugucucucugucucugucu

SEQ ID NO: 29081 - RNA, 20 nt, Artificial Sequence
  spacer sequence CTCN PAM
cugucucugucuuugucucc

SEQ ID NO: 29082 - RNA, 20 nt, Artificial Sequence
  spacer sequence CTCN PAM
gucucugucuuugucucccu

SEQ ID NO: 29083 - RNA, 20 nt, Artificial Sequence
  spacer sequence CTCN PAM
gucuuugucucccugucucu

SEQ ID NO: 29084 - RNA, 20 nt, Artificial Sequence
  spacer sequence CTCN PAM
cugucucugucucuggaucc

SEQ ID NO: 29085 - RNA, 20 nt, Artificial Sequence
  spacer sequence CTCN PAM
gucucuggaucccucugucu

SEQ ID NO: 29086 - RNA, 20 nt, Artificial Sequence
  spacer sequence CTCN PAM
ggaucccucugucuguuucu

SEQ ID NO: 29087 - RNA, 20 nt, Artificial Sequence
  spacer sequence CTCN PAM
gucuguuucucuagcucucu

SEQ ID NO: 29088 - RNA, 20 nt, Artificial Sequence
  spacer sequence CTCN PAM
agcucucucuuugucucugu

SEQ ID NO: 29089 - RNA, 20 nt, Artificial Sequence
  spacer sequence CTCN PAM
cucuuugucucugucucugu

SEQ ID NO: 29090 - RNA, 20 nt, Artificial Sequence
  spacer sequence CTCN PAM
cuuugucucugucucuguuu

SEQ ID NO: 29091 - RNA, 20 nt, Artificial Sequence
  spacer sequence CTCN PAM
uugucucugucucuguuucu

SEQ ID NO: 29092 - RNA, 20 nt, Artificial Sequence
  spacer sequence CTCN PAM
gucucuguuucucuaucucu

SEQ ID NO: 29093 - RNA, 20 nt, Artificial Sequence
  spacer sequence CTCN PAM
guuucucuaucucugucuau

SEQ ID NO: 29094 - RNA, 20 nt, Artificial Sequence
  spacer sequence CTCN PAM
aucucugucuaucucugucu

SEQ ID NO: 29095 - RNA, 20 nt, Artificial Sequence
  spacer sequence CTCN PAM
gucuaucucugucucagucc

SEQ ID NO: 29096 - RNA, 20 nt, Artificial Sequence
  spacer sequence CTCN PAM
gucucagucccuucuuuugc

SEQ ID NO: 29097 - RNA, 20 nt, Artificial Sequence
  spacer sequence CTCN PAM
gucccuucuuuugccaccau

SEQ ID NO: 29098 - RNA, 20 nt, Artificial Sequence
  spacer sequence CTCN PAM
cguggccgcccucacguguc

SEQ ID NO: 29099 - RNA, 20 nt, Artificial Sequence
  spacer sequence CTCN PAM
cgugucagcaccauacccuc

SEQ ID NO: 29100 - RNA, 20 nt, Artificial Sequence
  spacer sequence CTCN PAM
cuguggucagggccaccugc

SEQ ID NO: 29101 - RNA, 20 nt, Artificial Sequence
  spacer sequence CTCN PAM
aggguguccucaggucggug

SEQ ID NO: 29102 - RNA, 20 nt, Artificial Sequence
  spacer sequence CTCN PAM
ggucggugcuggccggcgug

SEQ ID NO: 29103 - RNA, 20 nt, Artificial Sequence
  spacer sequence CTCN PAM
gggccuggcccuggucaagc

SEQ ID NO: 29104 - RNA, 20 nt, Artificial Sequence
  spacer sequence CTCN PAM
cucugggccuggcccugguc

SEQ ID NO: 29105 - RNA, 20 nt, Artificial Sequence
  spacer sequence CTCN PAM
gugccaagacaacuuuaggg

SEQ ID NO: 29106 - RNA, 20 nt, Artificial Sequence
  spacer sequence CTCN PAM
aacccgucagacagguuugu

SEQ ID NO: 29107 - RNA, 20 nt, Artificial Sequence
  spacer sequence CTCN PAM
ccuccgcacugacgcuagga

SEQ ID NO: 29108 - RNA, 20 nt, Artificial Sequence
  spacer sequence CTCN PAM
gcacugacgcuaggacagcu

SEQ ID NO: 29109 - RNA, 20 nt, Artificial Sequence
  spacer sequence CTCN PAM
ggcuggguacaggcugcagc

SEQ ID NO: 29110 - RNA, 20 nt, Artificial Sequence
  spacer sequence CTCN PAM
ggacacagcccugacccaga

SEQ ID NO: 29111 - RNA, 20 nt, Artificial Sequence
  spacer sequence CTCN PAM
cugcacagggcgaccggcag

SEQ ID NO: 29112 - RNA, 20 nt, Artificial Sequence
  spacer sequence CTCN PAM
cuguuuauccucccugcaca

SEQ ID NO: 29113 - RNA, 20 nt, Artificial Sequence
  spacer sequence CTCN PAM
gcggggacaaagacucaggg

SEQ ID NO: 29114 - RNA, 20 nt, Artificial Sequence
  spacer sequence CTCN PAM
ggggagagugugcggggccu

SEQ ID NO: 29115 - RNA, 20 nt, Artificial Sequence
  spacer sequence CTCN PAM
ccugagucuuuguccccgcu

SEQ ID NO: 29116 - RNA, 20 nt, Artificial Sequence
  spacer sequence CTCN PAM
ccccugagucuuuguccccg

SEQ ID NO: 29117 - RNA, 20 nt, Artificial Sequence
  spacer sequence CTCN PAM
caccccaggccccgcacacu

SEQ ID NO: 29118 - RNA, 20 nt, Artificial Sequence
  spacer sequence CTCN PAM
caguccaucuauccucacac

SEQ ID NO: 29119 - RNA, 20 nt, Artificial Sequence
  spacer sequence CTCN PAM
cccaguccaucuauccucac

SEQ ID NO: 29120 - RNA, 20 nt, Artificial Sequence
  spacer sequence CTCN PAM
cucccaguccaucuauccuc

SEQ ID NO: 29121 - RNA, 20 nt, Artificial Sequence
  spacer sequence CTCN PAM
cucucccaguccaucuaucc

SEQ ID NO: 29122 - RNA, 20 nt, Artificial Sequence
  spacer sequence CTCN PAM
cucucucccaguccaucuau

SEQ ID NO: 29123 - RNA, 20 nt, Artificial Sequence
  spacer sequence CTCN PAM
aggguccccucucucucucc

SEQ ID NO: 29124 - RNA, 20 nt, Artificial Sequence
  spacer sequence CTCN PAM
augguucccuagugccccca

SEQ ID NO: 29125 - RNA, 20 nt, Artificial Sequence
  spacer sequence CTCN PAM
agaacccucaaugguucccu

SEQ ID NO: 29126 - RNA, 20 nt, Artificial Sequence
  spacer sequence CTCN PAM
guugcuccagaacccucaau

SEQ ID NO: 29127 - RNA, 20 nt, Artificial Sequence
  spacer sequence CTCN PAM
ccccauccaguacaccgcua

SEQ ID NO: 29128 - RNA, 20 nt, Artificial Sequence
  spacer sequence CTCN PAM
ucugguagucagacugaggc

SEQ ID NO: 29129 - RNA, 20 nt, Artificial Sequence
  spacer sequence CTCN PAM
gucugacuaccagaugagcc

SEQ ID NO: 29130 - RNA, 20 nt, Artificial Sequence
  spacer sequence CTCN PAM
ggccucagucugacuaccag

SEQ ID NO: 29131 - RNA, 20 nt, Artificial Sequence
  spacer sequence CTCN PAM
uccggccucagucugacuac

SEQ ID NO: 29132 - RNA, 20 nt, Artificial Sequence
  spacer sequence CTCN PAM
acugccccgaggaugaagaa

SEQ ID NO: 29133 - RNA, 20 nt, Artificial Sequence
  spacer sequence CTCN PAM
gggcaguugagccuccuccg

SEQ ID NO: 29134 - RNA, 20 nt, Artificial Sequence
  spacer sequence CTCN PAM
uuucuucauccucggggcag

SEQ ID NO: 29135 - RNA, 20 nt, Artificial Sequence
  spacer sequence CTCN PAM
cgccugucaucccagcacuu

SEQ ID NO: 29136 - RNA, 20 nt, Artificial Sequence
  spacer sequence CTCN PAM
caaagugcugggaugacagg

SEQ ID NO: 29137 - RNA, 20 nt, Artificial Sequence
  spacer sequence CTCN PAM
ggcaguccaccugccuuggc

SEQ ID NO: 29138 - RNA, 20 nt, Artificial Sequence
  spacer sequence CTCN PAM
ugaccucaggcaguccaccu

SEQ ID NO: 29139 - RNA, 20 nt, Artificial Sequence
  spacer sequence CTCN PAM
aacuccugaccucaggcagu

SEQ ID NO: 29140 - RNA, 20 nt, Artificial Sequence
  spacer sequence CTCN PAM
acugaauauacaaaaaaauu

SEQ ID NO: 29141 - RNA, 20 nt, Artificial Sequence
  spacer sequence CTCN PAM
gcaggcugaggcaagggaau

SEQ ID NO: 29142 - RNA, 20 nt, Artificial Sequence
  spacer sequence CTCN PAM
gccugccgaguagcugggau

SEQ ID NO: 29143 - RNA, 20 nt, Artificial Sequence
  spacer sequence CTCN PAM
cugcuucaagcaauucccuu

SEQ ID NO: 29144 - RNA, 20 nt, Artificial Sequence
  spacer sequence CTCN PAM
gccucccugcuucaagcaau

SEQ ID NO: 29145 - RNA, 20 nt, Artificial Sequence
  spacer sequence CTCN PAM
cugcaaccuccgccucccug

SEQ ID NO: 29146 - RNA, 20 nt, Artificial Sequence
  spacer sequence CTCN PAM
gcucacugcaaccuccgccu

SEQ ID NO: 29147 - RNA, 20 nt, Artificial Sequence
  spacer sequence CTCN PAM
acccugggugacagagagag

SEQ ID NO: 29148 - RNA, 20 nt, Artificial Sequence
  spacer sequence CTCN PAM
gucacccaggguggagugca

SEQ ID NO: 29149 - RNA, 20 nt, Artificial Sequence
  spacer sequence CTCN PAM
cugucacccaggguggagug

SEQ ID NO: 29150 - RNA, 20 nt, Artificial Sequence
  spacer sequence CTCN PAM
cucugucacccaggguggag

SEQ ID NO: 29151 - RNA, 20 nt, Artificial Sequence
  spacer sequence CTCN PAM
aaaaaaaaagagccaaacuu

SEQ ID NO: 29152 - RNA, 20 nt, Artificial Sequence
  spacer sequence CTCN PAM
uuuuuuuuugagacagaauc

SEQ ID NO: 29153 - RNA, 20 nt, Artificial Sequence
  spacer sequence CTCN PAM
aaauagaaaaaaaaaagaaa

SEQ ID NO: 29154 - RNA, 20 nt, Artificial Sequence
  spacer sequence CTCN PAM
gucgcccaggcuggagugca

SEQ ID NO: 29155 - RNA, 20 nt, Artificial Sequence
  spacer sequence CTCN PAM
agccugggcgacagagcaaa

SEQ ID NO: 29156 - RNA, 20 nt, Artificial Sequence
  spacer sequence CTCN PAM
gcucacagaacccuugaacu

SEQ ID NO: 29157 - RNA, 20 nt, Artificial Sequence
  spacer sequence CTCN PAM
cagaacccuugaacuccuug

SEQ ID NO: 29158 - RNA, 20 nt, Artificial Sequence
  spacer sequence CTCN PAM
uugccuggagcaauccuccc

SEQ ID NO: 29159 - RNA, 20 nt, Artificial Sequence
  spacer sequence CTCN PAM
aggcaaggaguucaaggguu

SEQ ID NO: 29160 - RNA, 20 nt, Artificial Sequence
  spacer sequence CTCN PAM
cuccucagccuccagaguag

SEQ ID NO: 29161 - RNA, 20 nt, Artificial Sequence
  spacer sequence CTCN PAM
ucagccuccagaguagcugg

SEQ ID NO: 29162 - RNA, 20 nt, Artificial Sequence
  spacer sequence CTCN PAM
gccuccagaguagcugggau

SEQ ID NO: 29163 - RNA, 20 nt, Artificial Sequence
  spacer sequence CTCN PAM
agaguagcugggaugacagg

SEQ ID NO: 29164 - RNA, 20 nt, Artificial Sequence
  spacer sequence CTCN PAM
ggaggcugaggagggaggau

SEQ ID NO: 29165 - RNA, 20 nt, Artificial Sequence
  spacer sequence CTCN PAM
ugccuguaaucccagcacuu

SEQ ID NO: 29166 - RNA, 20 nt, Artificial Sequence
  spacer sequence CTCN PAM
caaagugcugggauuacagg

SEQ ID NO: 29167 - RNA, 20 nt, Artificial Sequence
  spacer sequence CTCN PAM
cccgccuuggucucccaaag

SEQ ID NO: 29168 - RNA, 20 nt, Artificial Sequence
  spacer sequence CTCN PAM
ggugacucacccgccuuggu

SEQ ID NO: 29169 - RNA, 20 nt, Artificial Sequence
  spacer sequence CTCN PAM
ugaucucaggugacucaccc

SEQ ID NO: 29170 - RNA, 20 nt, Artificial Sequence
  spacer sequence CTCN PAM
aacuccugaucucaggugac

SEQ ID NO: 29171 - RNA, 20 nt, Artificial Sequence
  spacer sequence CTCN PAM
ccaacguggugaaacccuuu

SEQ ID NO: 29172 - RNA, 20 nt, Artificial Sequence
  spacer sequence CTCN PAM
acuaaaaaaaaaaaacaaaa

SEQ ID NO: 29173 - RNA, 20 nt, Artificial Sequence
  spacer sequence CTCN PAM
ggaggcugaugcaggagaau

SEQ ID NO: 29174 - RNA, 20 nt, Artificial Sequence
  spacer sequence CTCN PAM
cgaguagcugggauuauggg

SEQ ID NO: 29175 - RNA, 20 nt, Artificial Sequence
  spacer sequence CTCN PAM
ugcaucagccucccgaguag

SEQ ID NO: 29176 - RNA, 20 nt, Artificial Sequence
  spacer sequence CTCN PAM
uggguucaagcgauucuccu

SEQ ID NO: 29177 - RNA, 20 nt, Artificial Sequence
  spacer sequence CTCN PAM
gccuccuggguucaagcgau

SEQ ID NO: 29178 - RNA, 20 nt, Artificial Sequence
  spacer sequence CTCN PAM
ccgcaaccuccgccuccugg

SEQ ID NO: 29179 - RNA, 20 nt, Artificial Sequence
  spacer sequence CTCN PAM
agucugggcgaaagagcgag

SEQ ID NO: 29180 - RNA, 20 nt, Artificial Sequence
  spacer sequence CTCN PAM
uucgcccagacuggagugca

SEQ ID NO: 29181 - RNA, 20 nt, Artificial Sequence
  spacer sequence CTCN PAM
cucuuucgcccagacuggag

SEQ ID NO: 29182 - RNA, 20 nt, Artificial Sequence
  spacer sequence CTCN PAM
gucucgacaaacaaacaaac

SEQ ID NO: 29183 - RNA, 20 nt, Artificial Sequence
  spacer sequence CTCN PAM
acaaacaaacaaacaaacaa

SEQ ID NO: 29184 - RNA, 20 nt, Artificial Sequence
  spacer sequence CTCN PAM
ucacuacaaacaagguuuau

SEQ ID NO: 29185 - RNA, 20 nt, Artificial Sequence
  spacer sequence CTCN PAM
cuggguuacccaggcuaauc

SEQ ID NO: 29186 - RNA, 20 nt, Artificial Sequence
  spacer sequence CTCN PAM
uggcuucaagugagcuuccc

SEQ ID NO: 29187 - RNA, 20 nt, Artificial Sequence
  spacer sequence CTCN PAM
cuugaagccaggaguucaag

SEQ ID NO: 29188 - RNA, 20 nt, Artificial Sequence
  spacer sequence CTCN PAM
gucucccaaagugcugagau

SEQ ID NO: 29189 - RNA, 20 nt, Artificial Sequence
  spacer sequence CTCN PAM
caaagugcugagaugacagg

SEQ ID NO: 29190 - RNA, 20 nt, Artificial Sequence
  spacer sequence CTCN PAM
gcacuuugggagaccgaggu

SEQ ID NO: 29191 - RNA, 20 nt, Artificial Sequence
  spacer sequence CTCN PAM
caccugucaucucagcacuu

SEQ ID NO: 29192 - RNA, 20 nt, Artificial Sequence
  spacer sequence CTCN PAM
uuaugagccaggauugagcu

SEQ ID NO: 29193 - RNA, 20 nt, Artificial Sequence
  spacer sequence CTCN PAM
uaaugagcaccugauaggaa

SEQ ID NO: 29194 - RNA, 20 nt, Artificial Sequence
  spacer sequence CTCN PAM
auccuggcucauaaugagca

SEQ ID NO: 29195 - RNA, 20 nt, Artificial Sequence
  spacer sequence CTCN PAM
cauuuucuguagcucaaucc

SEQ ID NO: 29196 - RNA, 20 nt, Artificial Sequence
  spacer sequence CTCN PAM
cucgcauuuucuguagcuca

SEQ ID NO: 29197 - RNA, 20 nt, Artificial Sequence
  spacer sequence CTCN PAM
ccucccucgcauuuucugua

SEQ ID NO: 29198 - RNA, 20 nt, Artificial Sequence
  spacer sequence CTCN PAM
gcacccccugggcccacauc

SEQ ID NO: 29199 - RNA, 20 nt, Artificial Sequence
  spacer sequence CTCN PAM
gccuugucguccuuagaugu

SEQ ID NO: 29200 - RNA, 20 nt, Artificial Sequence
  spacer sequence CTCN PAM
aaugccagguccuguggcuu

SEQ ID NO: 29201 - RNA, 20 nt, Artificial Sequence
  spacer sequence CTCN PAM
ccaccgccccggggacaaag

SEQ ID NO: 29202 - RNA, 20 nt, Artificial Sequence
  spacer sequence CTCN PAM
ggugcccuacuucugcccgu

SEQ ID NO: 29203 - RNA, 20 nt, Artificial Sequence
  spacer sequence CTCN PAM
ucuggugcccuacuucugcc

SEQ ID NO: 29204 - RNA, 20 nt, Artificial Sequence
  spacer sequence CTCN PAM
gccagggcuggggccagagc

SEQ ID NO: 29205 - RNA, 20 nt, Artificial Sequence
  spacer sequence CTCN PAM
ggccccagcccuggcagagc

SEQ ID NO: 29206 - RNA, 20 nt, Artificial Sequence
  spacer sequence CTCN PAM
ccaccuugcagccccaucca

SEQ ID NO: 29207 - RNA, 20 nt, Artificial Sequence
  spacer sequence CTCN PAM
gaugaauacauggccccaac

SEQ ID NO: 29208 - RNA, 20 nt, Artificial Sequence
  spacer sequence CTCN PAM
gugccacccagggccaggcc

SEQ ID NO: 29209 - RNA, 20 nt, Artificial Sequence
  spacer sequence CTCN PAM
guaguggcccuggcaccugc

SEQ ID NO: 29210 - RNA, 20 nt, Artificial Sequence
  spacer sequence CTCN PAM
gggugugucuguucucugua

SEQ ID NO: 29211 - RNA, 20 nt, Artificial Sequence
  spacer sequence CTCN PAM
agcauccggcuucuucgugg

SEQ ID NO: 29212 - RNA, 20 nt, Artificial Sequence
  spacer sequence CTCN PAM
cguggcaggggccugccugg

SEQ ID NO: 29213 - RNA, 20 nt, Artificial Sequence
  spacer sequence CTCN PAM
ugggacccuugcccugcacu

SEQ ID NO: 29214 - RNA, 20 nt, Artificial Sequence
  spacer sequence CTCN PAM
aggccccaccauggcugccc

SEQ ID NO: 29215 - RNA, 20 nt, Artificial Sequence
  spacer sequence CTCN PAM
gggcagccaugguggggccu

SEQ ID NO: 29216 - RNA, 20 nt, Artificial Sequence
  spacer sequence CTCN PAM
gauccgcugcccggccccga

SEQ ID NO: 29217 - RNA, 20 nt, Artificial Sequence
  spacer sequence CTCN PAM
gggccgggcagcggauccga

SEQ ID NO: 29218 - RNA, 20 nt, Artificial Sequence
  spacer sequence CTCN PAM
ggaauuucccucggggccgg

SEQ ID NO: 29219 - RNA, 20 nt, Artificial Sequence
  spacer sequence CTCN PAM
uggcugacucauucuaggug

SEQ ID NO: 29220 - RNA, 20 nt, Artificial Sequence
  spacer sequence CTCN PAM
uucuaggugccaguagcacg

SEQ ID NO: 29221 - RNA, 20 nt, Artificial Sequence
  spacer sequence CTCN PAM
cgugcuacuggcaccuagaa

SEQ ID NO: 29222 - RNA, 20 nt, Artificial Sequence
  spacer sequence CTCN PAM
auugcccagccccucccgug

SEQ ID NO: 29223 - RNA, 20 nt, Artificial Sequence
  spacer sequence CTCN PAM
aaaugcccccaggcccucca

SEQ ID NO: 29224 - RNA, 20 nt, Artificial Sequence
  spacer sequence CTCN PAM
caguucuccaaaugccccca

SEQ ID NO: 29225 - RNA, 20 nt, Artificial Sequence
  spacer sequence CTCN PAM
ucacaguucuccaaaugccc

SEQ ID NO: 29226 - RNA, 20 nt, Artificial Sequence
  spacer sequence CTCN PAM
ucugagggccaguuucugcu

SEQ ID NO: 29227 - RNA, 20 nt, Artificial Sequence
  spacer sequence CTCN PAM
gagggccaguuucugcugcg

SEQ ID NO: 29228 - RNA, 20 nt, Artificial Sequence
  spacer sequence CTCN PAM
gaggagguggucagacuccu

SEQ ID NO: 29229 - RNA, 20 nt, Artificial Sequence
  spacer sequence CTCN PAM
ccagccccagcccuggcauc

SEQ ID NO: 29230 - RNA, 20 nt, Artificial Sequence
  spacer sequence CTCN PAM
aaaaaaaaaaaaaaaugaug

SEQ ID NO: 29231 - RNA, 20 nt, Artificial Sequence
  spacer sequence CTCN PAM
gucucaaaaaaaaaaaaaaa

SEQ ID NO: 29232 - RNA, 20 nt, Artificial Sequence
  spacer sequence CTCN PAM
uguugcccaggcaugggugc

SEQ ID NO: 29233 - RNA, 20 nt, Artificial Sequence
  spacer sequence CTCN PAM
cugcaaccucagcuucccgg

SEQ ID NO: 29234 - RNA, 20 nt, Artificial Sequence
  spacer sequence CTCN PAM
gcuucccggguucaagugau

SEQ ID NO: 29235 - RNA, 20 nt, Artificial Sequence
  spacer sequence CTCN PAM
gccuccccaguagcugggau

SEQ ID NO: 29236 - RNA, 20 nt, Artificial Sequence
  spacer sequence CTCN PAM
ccaguagcugggauuacagg

SEQ ID NO: 29237 - RNA, 20 nt, Artificial Sequence
  spacer sequence CTCN PAM
ugaccucaggugauccaccc

SEQ ID NO: 29238 - RNA, 20 nt, Artificial Sequence
  spacer sequence CTCN PAM
ggugauccacccgccucagc

SEQ ID NO: 29239 - RNA, 20 nt, Artificial Sequence
  spacer sequence CTCN PAM
gccucccaaagugcugggau

SEQ ID NO: 29240 - RNA, 20 nt, Artificial Sequence
  spacer sequence CTCN PAM
caaagugcugggaugacagg

SEQ ID NO: 29241 - RNA, 20 nt, Artificial Sequence
  spacer sequence CTCN PAM
cgccugucaucccagcacuu

SEQ ID NO: 29242 - RNA, 20 nt, Artificial Sequence
  spacer sequence CTCN PAM
gcccaggccagcaucuacag

SEQ ID NO: 29243 - RNA, 20 nt, Artificial Sequence
  spacer sequence CTCN PAM
uagaacccagauucccacuu

SEQ ID NO: 29244 - RNA, 20 nt, Artificial Sequence
  spacer sequence CTCN PAM
ccuccuagaacccagauucc

SEQ ID NO: 29245 - RNA, 20 nt, Artificial Sequence
  spacer sequence CTCN PAM
acccauugcaaccccccacc

SEQ ID NO: 29246 - RNA, 20 nt, Artificial Sequence
  spacer sequence CTCN PAM
ccacccauugcaacccccca

SEQ ID NO: 29247 - RNA, 20 nt, Artificial Sequence
  spacer sequence CTCN PAM
cguccacaggguugcaagcg

SEQ ID NO: 29248 - RNA, 20 nt, Artificial Sequence
  spacer sequence CTCN PAM
gccagucccgcuugcaaccc

SEQ ID NO: 29249 - RNA, 20 nt, Artificial Sequence
  spacer sequence CTCN PAM
cugacuuuuguuucaacucu

SEQ ID NO: 29250 - RNA, 20 nt, Artificial Sequence
  spacer sequence CTCN PAM
agccuauaaucccagcacuu

SEQ ID NO: 29251 - RNA, 20 nt, Artificial Sequence
  spacer sequence CTCN PAM
gcuucccaaagugcugggau

SEQ ID NO: 29252 - RNA, 20 nt, Artificial Sequence
  spacer sequence CTCN PAM
cucggcuucccaaagugcug

SEQ ID NO: 29253 - RNA, 20 nt, Artificial Sequence
  spacer sequence CTCN PAM
ggugaucagccucccucggc

SEQ ID NO: 29254 - RNA, 20 nt, Artificial Sequence
  spacer sequence CTCN PAM
ugaccucaggugaucagccu

SEQ ID NO: 29255 - RNA, 20 nt, Artificial Sequence
  spacer sequence CTCN PAM
aacuccugaccucaggugau

SEQ ID NO: 29256 - RNA, 20 nt, Artificial Sequence
  spacer sequence CTCN PAM
auguuggccaggcuggucuc

SEQ ID NO: 29257 - RNA, 20 nt, Artificial Sequence
  spacer sequence CTCN PAM
acaaaaaauacaaaaauuag

SEQ ID NO: 29258 - RNA, 20 nt, Artificial Sequence
  spacer sequence CTCN PAM
ggaggcugaggcuggagaau

SEQ ID NO: 29259 - RNA, 20 nt, Artificial Sequence
  spacer sequence CTCN PAM
cgaguagcugggauuacagg

SEQ ID NO: 29260 - RNA, 20 nt, Artificial Sequence
  spacer sequence CTCN PAM
gccucccgaguagcugggau

SEQ ID NO: 29261 - RNA, 20 nt, Artificial Sequence
  spacer sequence CTCN PAM
agccucagccucccgaguag

SEQ ID NO: 29262 - RNA, 20 nt, Artificial Sequence
  spacer sequence CTCN PAM
cagguucaagcaauucucca

SEQ ID NO: 29263 - RNA, 20 nt, Artificial Sequence
  spacer sequence CTCN PAM
gccucccagguucaagcaau

SEQ ID NO: 29264 - RNA, 20 nt, Artificial Sequence
  spacer sequence CTCN PAM
cugcaaccuccgccucccag

SEQ ID NO: 29265 - RNA, 20 nt, Artificial Sequence
  spacer sequence CTCN PAM
gcucgcugcaaccuccgccu

SEQ ID NO: 29266 - RNA, 20 nt, Artificial Sequence
  spacer sequence CTCN PAM
agccugggugacagagcaag

SEQ ID NO: 29267 - RNA, 20 nt, Artificial Sequence
  spacer sequence CTCN PAM
gucacccaggcuggagugca

SEQ ID NO: 29268 - RNA, 20 nt, Artificial Sequence
  spacer sequence CTCN PAM
aucucaaaaaaacaaaagag

SEQ ID NO: 29269 - RNA, 20 nt, Artificial Sequence
  spacer sequence CTCN PAM
aaaaaacaaaagaggagugu

SEQ ID NO: 29270 - RNA, 20 nt, Artificial Sequence
  spacer sequence CTCN PAM
uuuguuuuuuugagauggag

SEQ ID NO: 29271 - RNA, 20 nt, Artificial Sequence
  spacer sequence CTCN PAM
ucuuuuguuuuuuugagaug

SEQ ID NO: 29272 - RNA, 20 nt, Artificial Sequence
  spacer sequence CTCN PAM
cccccggggcucugugaccu

SEQ ID NO: 29273 - RNA, 20 nt, Artificial Sequence
  spacer sequence CTCN PAM
gugaccucaggaaggcacau

SEQ ID NO: 29274 - RNA, 20 nt, Artificial Sequence
  spacer sequence CTCN PAM
ggaaggcacaugaccuccca

SEQ ID NO: 29275 - RNA, 20 nt, Artificial Sequence
  spacer sequence CTCN PAM
cacacuucaguuugcccauc

SEQ ID NO: 29276 - RNA, 20 nt, Artificial Sequence
  spacer sequence CTCN PAM
uuuuauagaugggcaaacug

SEQ ID NO: 29277 - RNA, 20 nt, Artificial Sequence
  spacer sequence CTCN PAM
uuuggaagccuuuugugaga

SEQ ID NO: 29278 - RNA, 20 nt, Artificial Sequence
  spacer sequence CTCN PAM
caaaaggcuuccaaaggagg

SEQ ID NO: 29279 - RNA, 20 nt, Artificial Sequence
  spacer sequence CTCN PAM
aaacacuuaacacauaccag

SEQ ID NO: 29280 - RNA, 20 nt, Artificial Sequence
  spacer sequence CTCN PAM
ucaccauaccccaagcccca

SEQ ID NO: 29281 - RNA, 20 nt, Artificial Sequence
  spacer sequence CTCN PAM
caaagugcugggauuacagg

SEQ ID NO: 29282 - RNA, 20 nt, Artificial Sequence
  spacer sequence CTCN PAM
gccucccaaagugcugggau

SEQ ID NO: 29283 - RNA, 20 nt, Artificial Sequence
  spacer sequence CTCN PAM
ccucggccucccaaagugcu

SEQ ID NO: 29284 - RNA, 20 nt, Artificial Sequence
  spacer sequence CTCN PAM
agugauuugcucgccucggc

SEQ ID NO: 29285 - RNA, 20 nt, Artificial Sequence
  spacer sequence CTCN PAM
ugaccucaagugauuugcuc

SEQ ID NO: 29286 - RNA, 20 nt, Artificial Sequence
  spacer sequence CTCN PAM
aacuccugaccucaagugau

SEQ ID NO: 29287 - RNA, 20 nt, Artificial Sequence
  spacer sequence CTCN PAM
aguauaaauacaaaaauuag

SEQ ID NO: 29288 - RNA, 20 nt, Artificial Sequence
  spacer sequence CTCN PAM
ucaguagcugggacuauagg

SEQ ID NO: 29289 - RNA, 20 nt, Artificial Sequence
  spacer sequence CTCN PAM
gccucuucaguagcugggac

SEQ ID NO: 29290 - RNA, 20 nt, Artificial Sequence
  spacer sequence CTCN PAM
ugccucagccucuucaguag

SEQ ID NO: 29291 - RNA, 20 nt, Artificial Sequence
  spacer sequence CTCN PAM
cagauucaauagauucuccu

SEQ ID NO: 29292 - RNA, 20 nt, Artificial Sequence
  spacer sequence CTCN PAM
gccucccagauucaauagau

SEQ ID NO: 29293 - RNA, 20 nt, Artificial Sequence
  spacer sequence CTCN PAM
cugcaaccucugccucccag

SEQ ID NO: 29294 - RNA, 20 nt, Artificial Sequence
  spacer sequence CTCN PAM
gcucacugcaaccucugccu

SEQ ID NO: 29295 - RNA, 20 nt, Artificial Sequence
  spacer sequence CTCN PAM
agccugggcgacagagccag

SEQ ID NO: 29296 - RNA, 20 nt, Artificial Sequence
  spacer sequence CTCN PAM
gucgcccaggcuggagugca

SEQ ID NO: 29297 - RNA, 20 nt, Artificial Sequence
  spacer sequence CTCN PAM
accucaaaaaaaaaaaaaaa

SEQ ID NO: 29298 - RNA, 20 nt, Artificial Sequence
  spacer sequence CTCN PAM
aaaaaaaaaaaaaaaacaaa

SEQ ID NO: 29299 - RNA, 20 nt, Artificial Sequence
  spacer sequence CTCN PAM
uuuuuaaaaaacaggaauuu

SEQ ID NO: 29300 - RNA, 20 nt, Artificial Sequence
  spacer sequence CTCN PAM
uggaacugaaagauuuaggg

SEQ ID NO: 29301 - RNA, 20 nt, Artificial Sequence
  spacer sequence CTCN PAM
aucccuaaaucuuucaguuc

SEQ ID NO: 29302 - RNA, 20 nt, Artificial Sequence
  spacer sequence CTCN PAM
aggccaccccucucagcacc

SEQ ID NO: 29303 - RNA, 20 nt, Artificial Sequence
  spacer sequence CTCN PAM
cagcaccguugauguucugg

SEQ ID NO: 29304 - RNA, 20 nt, Artificial Sequence
  spacer sequence CTCN PAM
gcaccguugauguucuggaa

SEQ ID NO: 29305 - RNA, 20 nt, Artificial Sequence
  spacer sequence CTCN PAM
gcaaugacccuggccuccac

SEQ ID NO: 29306 - RNA, 20 nt, Artificial Sequence
  spacer sequence CTCN PAM
acccagucaacgucuguagc

SEQ ID NO: 29307 - RNA, 20 nt, Artificial Sequence
  spacer sequence CTCN PAM
agacauugcugagugucccc

SEQ ID NO: 29308 - RNA, 20 nt, Artificial Sequence
  spacer sequence CTCN PAM
gcaaugucuggagauguuuu

SEQ ID NO: 29309 - RNA, 20 nt, Artificial Sequence
  spacer sequence CTCN PAM
accaagggugauuacacccc

SEQ ID NO: 29310 - RNA, 20 nt, Artificial Sequence
  spacer sequence CTCN PAM
gucagugucacaaggaugug

SEQ ID NO: 29311 - RNA, 20 nt, Artificial Sequence
  spacer sequence CTCN PAM
aucucuuagcauugccaucc

SEQ ID NO: 29312 - RNA, 20 nt, Artificial Sequence
  spacer sequence CTCN PAM
uagcauugccauccccucuc

SEQ ID NO: 29313 - RNA, 20 nt, Artificial Sequence
  spacer sequence CTCN PAM
cuuggcuuuuuucuuuucuu

SEQ ID NO: 29314 - RNA, 20 nt, Artificial Sequence
  spacer sequence CTCN PAM
uggcuuuuuucuuuucuuuu

SEQ ID NO: 29315 - RNA, 20 nt, Artificial Sequence
  spacer sequence CTCN PAM
aaaaaaaaaaaaaaaaaaaa

SEQ ID NO: 29316 - RNA, 20 nt, Artificial Sequence
  spacer sequence CTCN PAM
cucugucaccucugcuggag

SEQ ID NO: 29317 - RNA, 20 nt, Artificial Sequence
  spacer sequence CTCN PAM
gucaccucugcuggagccca

SEQ ID NO: 29318 - RNA, 20 nt, Artificial Sequence
  spacer sequence CTCN PAM
gcuggagcccaauaauguga

SEQ ID NO: 29319 - RNA, 20 nt, Artificial Sequence
  spacer sequence CTCN PAM
agcagaggugacagagcgag

SEQ ID NO: 29320 - RNA, 20 nt, Artificial Sequence
  spacer sequence CTCN PAM
ggucacauuauugggcucca

SEQ ID NO: 29321 - RNA, 20 nt, Artificial Sequence
  spacer sequence CTCN PAM
cugcaaccucugccucccgg

SEQ ID NO: 29322 - RNA, 20 nt, Artificial Sequence
  spacer sequence CTCN PAM
gccucccggguucaagugau

SEQ ID NO: 29323 - RNA, 20 nt, Artificial Sequence
  spacer sequence CTCN PAM
cggguucaagugauucuccu

SEQ ID NO: 29324 - RNA, 20 nt, Artificial Sequence
  spacer sequence CTCN PAM
ugccucagccucccgaguag

SEQ ID NO: 29325 - RNA, 20 nt, Artificial Sequence
  spacer sequence CTCN PAM
gccucccgaguagcugggac

SEQ ID NO: 29326 - RNA, 20 nt, Artificial Sequence
  spacer sequence CTCN PAM
cgaguagcugggacuacggg

SEQ ID NO: 29327 - RNA, 20 nt, Artificial Sequence
  spacer sequence CTCN PAM
ggaggcugaggcaggagaau

SEQ ID NO: 29328 - RNA, 20 nt, Artificial Sequence
  spacer sequence CTCN PAM
acuaaaaauacguaaauuag

SEQ ID NO: 29329 - RNA, 20 nt, Artificial Sequence
  spacer sequence CTCN PAM
ugaccucaggugauccaccc

SEQ ID NO: 29330 - RNA, 20 nt, Artificial Sequence
  spacer sequence CTCN PAM
ggugauccacccgccaugac

SEQ ID NO: 29331 - RNA, 20 nt, Artificial Sequence
  spacer sequence CTCN PAM
caaagugcugggauuacagg

SEQ ID NO: 29332 - RNA, 20 nt, Artificial Sequence
  spacer sequence CTCN PAM
cgccuguaaucccagcacuu

SEQ ID NO: 29333 - RNA, 20 nt, Artificial Sequence
  spacer sequence CTCN PAM
cuuauuuuuuuuuucuucaa

SEQ ID NO: 29334 - RNA, 20 nt, Artificial Sequence
  spacer sequence CTCN PAM
uauuuuuuuuuucuucaaca

SEQ ID NO: 29335 - RNA, 20 nt, Artificial Sequence
  spacer sequence CTCN PAM
ucugcccaucaucuuaacag

SEQ ID NO: 29336 - RNA, 20 nt, Artificial Sequence
  spacer sequence CTCN PAM
ugccagggcuguuaagauga

SEQ ID NO: 29337 - RNA, 20 nt, Artificial Sequence
  spacer sequence CTCN PAM
ucccaaggugggggcaccaa

SEQ ID NO: 29338 - RNA, 20 nt, Artificial Sequence
  spacer sequence CTCN PAM
cuggcacuuuggugccccca

SEQ ID NO: 29339 - RNA, 20 nt, Artificial Sequence
  spacer sequence CTCN PAM
uucgcccagccugggucaca

SEQ ID NO: 29340 - RNA, 20 nt, Artificial Sequence
  spacer sequence CTCN PAM
auacaaccaugugaucccug

SEQ ID NO: 29341 - RNA, 20 nt, Artificial Sequence
  spacer sequence CTCN PAM
cuccauacaaccaugugauc

SEQ ID NO: 29342 - RNA, 20 nt, Artificial Sequence
  spacer sequence CTCN PAM
uggucgggaugggcacggcg

SEQ ID NO: 29343 - RNA, 20 nt, Artificial Sequence
  spacer sequence CTCN PAM
cgccugucaucccagcacuu

SEQ ID NO: 29344 - RNA, 20 nt, Artificial Sequence
  spacer sequence CTCN PAM
caaagugcugggaugacagg

SEQ ID NO: 29345 - RNA, 20 nt, Artificial Sequence
  spacer sequence CTCN PAM
gccucccaaagugcugggau

SEQ ID NO: 29346 - RNA, 20 nt, Artificial Sequence
  spacer sequence CTCN PAM
ugccuguaaucccagaacuu

SEQ ID NO: 29347 - RNA, 20 nt, Artificial Sequence
  spacer sequence CTCN PAM
caaaguucugggauuacagg

SEQ ID NO: 29348 - RNA, 20 nt, Artificial Sequence
  spacer sequence CTCN PAM
gccucccaaaguucugggau

SEQ ID NO: 29349 - RNA, 20 nt, Artificial Sequence
  spacer sequence CTCN PAM
ggugauccaccugccucggc

SEQ ID NO: 29350 - RNA, 20 nt, Artificial Sequence
  spacer sequence CTCN PAM
uaaccucaggugauccaccu

SEQ ID NO: 29351 - RNA, 20 nt, Artificial Sequence
  spacer sequence CTCN PAM
auugaaaauccaaaaauuau

SEQ ID NO: 29352 - RNA, 20 nt, Artificial Sequence
  spacer sequence CTCN PAM
agaggcugagacaggagaau

SEQ ID NO: 29353 - RNA, 20 nt, Artificial Sequence
  spacer sequence CTCN PAM
ggaguagcugggacuacagg

SEQ ID NO: 29354 - RNA, 20 nt, Artificial Sequence
  spacer sequence CTCN PAM
gccucuggaguagcugggac

SEQ ID NO: 29355 - RNA, 20 nt, Artificial Sequence
  spacer sequence CTCN PAM
ugucucagccucuggaguag

SEQ ID NO: 29356 - RNA, 20 nt, Artificial Sequence
  spacer sequence CTCN PAM
gcuucccagauucaagcaau

SEQ ID NO: 29357 - RNA, 20 nt, Artificial Sequence
  spacer sequence CTCN PAM
agcccgggcaacagagcgag

SEQ ID NO: 29358 - RNA, 20 nt, Artificial Sequence
  spacer sequence CTCN PAM
guugcccgggcuggagugca

SEQ ID NO: 29359 - RNA, 20 nt, Artificial Sequence
  spacer sequence CTCN PAM
cucuguugcccgggcuggag

SEQ ID NO: 29360 - RNA, 20 nt, Artificial Sequence
  spacer sequence CTCN PAM
gucucaaaaaaaaaaaaaga

SEQ ID NO: 29361 - RNA, 20 nt, Artificial Sequence
  spacer sequence CTCN PAM
aaaaaaaaaaaagagaguca

SEQ ID NO: 29362 - RNA, 20 nt, Artificial Sequence
  spacer sequence CTCN PAM
uuuuuuuuuuuugagacgga

SEQ ID NO: 29363 - RNA, 20 nt, Artificial Sequence
  spacer sequence CTCN PAM
cuuuuuuuuuuuuugagacg

SEQ ID NO: 29364 - RNA, 20 nt, Artificial Sequence
  spacer sequence CTCN PAM
acacugacucucuuuuuuuu

SEQ ID NO: 29365 - RNA, 20 nt, Artificial Sequence
  spacer sequence CTCN PAM
guuggguccgggugcucugu

SEQ ID NO: 29366 - RNA, 20 nt, Artificial Sequence
  spacer sequence CTCN PAM
gugggacucugaggaaaagc

SEQ ID NO: 29367 - RNA, 20 nt, Artificial Sequence
  spacer sequence CTCN PAM
gaggaaaagcucgcaccagg

SEQ ID NO: 29368 - RNA, 20 nt, Artificial Sequence
  spacer sequence CTCN PAM
gagucccacagagcacccgg

SEQ ID NO: 29369 - RNA, 20 nt, Artificial Sequence
  spacer sequence CTCN PAM
caccagguagaugcuguucu

SEQ ID NO: 29370 - RNA, 20 nt, Artificial Sequence
  spacer sequence CTCN PAM
guuuguugggguguccuuua

SEQ ID NO: 29371 - RNA, 20 nt, Artificial Sequence
  spacer sequence CTCN PAM
ucgguuuguugggguguccu

SEQ ID NO: 29372 - RNA, 20 nt, Artificial Sequence
  spacer sequence CTCN PAM
uaugcccucuucgcgcagac

SEQ ID NO: 29373 - RNA, 20 nt, Artificial Sequence
  spacer sequence CTCN PAM
ucgcgcagaccugccaggaa

SEQ ID NO: 29374 - RNA, 20 nt, Artificial Sequence
  spacer sequence CTCN PAM
uccuggcaggucugcgcgaa

SEQ ID NO: 29375 - RNA, 20 nt, Artificial Sequence
  spacer sequence CTCN PAM
ucugucaauuucguggaauu

SEQ ID NO: 29376 - RNA, 20 nt, Artificial Sequence
  spacer sequence CTCN PAM
aagaaguguuuggagagaug

SEQ ID NO: 29377 - RNA, 20 nt, Artificial Sequence
  spacer sequence CTCN PAM
aaacacuucuuggagaauuc

SEQ ID NO: 29378 - RNA, 20 nt, Artificial Sequence
  spacer sequence CTCN PAM
ccaaacacuucuuggagaau

SEQ ID NO: 29379 - RNA, 20 nt, Artificial Sequence
  spacer sequence CTCN PAM
uuugcagacguggucuucca

SEQ ID NO: 29380 - RNA, 20 nt, Artificial Sequence
  spacer sequence CTCN PAM
ucaaacuucacuucuccuuu

SEQ ID NO: 29381 - RNA, 20 nt, Artificial Sequence
  spacer sequence CTCN PAM
cugugacagggagauuaaaa

SEQ ID NO: 29382 - RNA, 20 nt, Artificial Sequence
  spacer sequence CTCN PAM
cugucacagcgagcuuuguc

SEQ ID NO: 29383 - RNA, 20 nt, Artificial Sequence
  spacer sequence CTCN PAM
gaaauguaagaaaggguaag

SEQ ID NO: 29384 - RNA, 20 nt, Artificial Sequence
  spacer sequence CTCN PAM
uagaaggccaccaucugccu

SEQ ID NO: 29385 - RNA, 20 nt, Artificial Sequence
  spacer sequence CTCN PAM
gaacaucgcccaaagaucaa

SEQ ID NO: 29386 - RNA, 20 nt, Artificial Sequence
  spacer sequence CTCN PAM
uaugguuguuuaucuuuggc

SEQ ID NO: 29387 - RNA, 20 nt, Artificial Sequence
  spacer sequence CTCN PAM
uguagcuuaacugcuuucug

SEQ ID NO: 29388 - RNA, 20 nt, Artificial Sequence
  spacer sequence CTCN PAM
ccuguagcuuaacugcuuuc

SEQ ID NO: 29389 - RNA, 20 nt, Artificial Sequence
  spacer sequence CTCN PAM
aagaagaacaaaccagaaga

SEQ ID NO: 29390 - RNA, 20 nt, Artificial Sequence
  spacer sequence CTCN PAM
ucuucugguuuguucuucuu

SEQ ID NO: 29391 - RNA, 20 nt, Artificial Sequence
  spacer sequence CTCN PAM
ucaucuucugguuuguucuu

SEQ ID NO: 29392 - RNA, 20 nt, Artificial Sequence
  spacer sequence CTCN PAM
uccucaucuucugguuuguu

SEQ ID NO: 29393 - RNA, 20 nt, Artificial Sequence
  spacer sequence CTCN PAM
uccuccucaucuucugguuu

SEQ ID NO: 29394 - RNA, 20 nt, Artificial Sequence
  spacer sequence CTCN PAM
uccuccuccucaucuucugg

SEQ ID NO: 29395 - RNA, 20 nt, Artificial Sequence
  spacer sequence CTCN PAM
uccuccuccuccucaucuuc

SEQ ID NO: 29396 - RNA, 20 nt, Artificial Sequence
  spacer sequence CTCN PAM
ucuucaucuucuuucuccuc

SEQ ID NO: 29397 - RNA, 20 nt, Artificial Sequence
  spacer sequence CTCN PAM
ucaucuucaucuucuuucuc

SEQ ID NO: 29398 - RNA, 20 nt, Artificial Sequence
  spacer sequence CTCN PAM
uccuccucaucuucaucuuc

SEQ ID NO: 29399 - RNA, 20 nt, Artificial Sequence
  spacer sequence CTCN PAM
guauuagcuucaguauaaaa

SEQ ID NO: 29400 - RNA, 20 nt, Artificial Sequence
  spacer sequence CTCN PAM
uaagauucucuguacagaaa

SEQ ID NO: 29401 - RNA, 20 nt, Artificial Sequence
  spacer sequence CTCN PAM
guacagaaaauacuuuucuu

SEQ ID NO: 29402 - RNA, 20 nt, Artificial Sequence
  spacer sequence CTCN PAM
aaaaaaagaaaagaaaagaa

SEQ ID NO: 29403 - RNA, 20 nt, Artificial Sequence
  spacer sequence CTCN PAM
gucucaaaaaaaagaaaaga

SEQ ID NO: 29404 - RNA, 20 nt, Artificial Sequence
  spacer sequence CTCN PAM
uguugccuaggcuggagugc

SEQ ID NO: 29405 - RNA, 20 nt, Artificial Sequence
  spacer sequence CTCN PAM
agccuaggcaacaagagcga

SEQ ID NO: 29406 - RNA, 20 nt, Artificial Sequence
  spacer sequence CTCN PAM
gcucaccgcaaccuccgccu

SEQ ID NO: 29407 - RNA, 20 nt, Artificial Sequence
  spacer sequence CTCN PAM
ccgcaaccuccgccucccgg

SEQ ID NO: 29408 - RNA, 20 nt, Artificial Sequence
  spacer sequence CTCN PAM
gccucccggguccugguuca

SEQ ID NO: 29409 - RNA, 20 nt, Artificial Sequence
  spacer sequence CTCN PAM
cggguccugguucaagcagu

SEQ ID NO: 29410 - RNA, 20 nt, Artificial Sequence
  spacer sequence CTCN PAM
ugccucagccuccugaguag

SEQ ID NO: 29411 - RNA, 20 nt, Artificial Sequence
  spacer sequence CTCN PAM
gccuccugaguagcugggau

SEQ ID NO: 29412 - RNA, 20 nt, Artificial Sequence
  spacer sequence CTCN PAM
ugaguagcugggauuacagg

SEQ ID NO: 29413 - RNA, 20 nt, Artificial Sequence
  spacer sequence CTCN PAM
ggaggcugaggcaggagaac

SEQ ID NO: 29414 - RNA, 20 nt, Artificial Sequence
  spacer sequence CTCN PAM
gcuaauuuuuguauuuuuag

SEQ ID NO: 29415 - RNA, 20 nt, Artificial Sequence
  spacer sequence CTCN PAM
acuaaaaauacaaaaauuag

SEQ ID NO: 29416 - RNA, 20 nt, Artificial Sequence
  spacer sequence CTCN PAM
ugaccucgugauccgccugc

SEQ ID NO: 29417 - RNA, 20 nt, Artificial Sequence
  spacer sequence CTCN PAM
ugauccgccugcuucggccu

SEQ ID NO: 29418 - RNA, 20 nt, Artificial Sequence
  spacer sequence CTCN PAM
caaaauacugggauuacagg

SEQ ID NO: 29419 - RNA, 20 nt, Artificial Sequence
  spacer sequence CTCN PAM
caccuguaaucccaguauuu

SEQ ID NO: 29420 - RNA, 20 nt, Artificial Sequence
  spacer sequence CTCN PAM
cagcacaucuccguccaggc

SEQ ID NO: 29421 - RNA, 20 nt, Artificial Sequence
  spacer sequence CTCN PAM
guccaggcacuugagagaau

SEQ ID NO: 29422 - RNA, 20 nt, Artificial Sequence
  spacer sequence CTCN PAM
agugccuggacggagaugug

SEQ ID NO: 29423 - RNA, 20 nt, Artificial Sequence
  spacer sequence CTCN PAM
caagugccuggacggagaug

SEQ ID NO: 29424 - RNA, 20 nt, Artificial Sequence
  spacer sequence CTCN PAM
uagucauucucucaagugcc

SEQ ID NO: 29425 - RNA, 20 nt, Artificial Sequence
  spacer sequence CTCN PAM
aagaaccccuccuagucauu

SEQ ID NO: 29426 - RNA, 20 nt, Artificial Sequence
  spacer sequence CTCN PAM
uccaagaaccccuccuaguc

SEQ ID NO: 29427 - RNA, 20 nt, Artificial Sequence
  spacer sequence CTCN PAM
guucaaagaccaccuccucc

SEQ ID NO: 29428 - RNA, 20 nt, Artificial Sequence
  spacer sequence CTCN PAM
ggaaauacuuggugaccauu

SEQ ID NO: 29429 - RNA, 20 nt, Artificial Sequence
  spacer sequence CTCN PAM
gaaggggcgugggaccuacc

SEQ ID NO: 29430 - RNA, 20 nt, Artificial Sequence
  spacer sequence CTCN PAM
agauuccaagaaguuggggu

SEQ ID NO: 29431 - RNA, 20 nt, Artificial Sequence
  spacer sequence CTCN PAM
caccccaacuucuuggaauc

SEQ ID NO: 29432 - RNA, 20 nt, Artificial Sequence
  spacer sequence CTCN PAM
uuucuguacugauugcuggc

SEQ ID NO: 29433 - RNA, 20 nt, Artificial Sequence
  spacer sequence CTCN PAM
aacuuauuuugguaucucuu

SEQ ID NO: 29434 - RNA, 20 nt, Artificial Sequence
  spacer sequence CTCN PAM
ccaacucaaacuuauuuugg

SEQ ID NO: 29435 - RNA, 20 nt, Artificial Sequence
  spacer sequence CTCN PAM
uccagaaaacugaaguugaa

SEQ ID NO: 29436 - RNA, 20 nt, Artificial Sequence
  spacer sequence CTCN PAM
aaaaaaaaaaaaagaucucu

SEQ ID NO: 29437 - RNA, 20 nt, Artificial Sequence
  spacer sequence CTCN PAM
gucucaaaaaaaaaaaaaag

SEQ ID NO: 29438 - RNA, 20 nt, Artificial Sequence
  spacer sequence CTCN PAM
uauugcccaagcuggagugc

SEQ ID NO: 29439 - RNA, 20 nt, Artificial Sequence
  spacer sequence CTCN PAM
agcuugggcaauaagagcga

SEQ ID NO: 29440 - RNA, 20 nt, Artificial Sequence
  spacer sequence CTCN PAM
gcucaccgcaaccuccuccu

SEQ ID NO: 29441 - RNA, 20 nt, Artificial Sequence
  spacer sequence CTCN PAM
ccgcaaccuccuccucccgg

SEQ ID NO: 29442 - RNA, 20 nt, Artificial Sequence
  spacer sequence CTCN PAM
uccucccggguucaagcgau

SEQ ID NO: 29443 - RNA, 20 nt, Artificial Sequence
  spacer sequence CTCN PAM
ucccggguucaagcgauucu

SEQ ID NO: 29444 - RNA, 20 nt, Artificial Sequence
  spacer sequence CTCN PAM
cggguucaagcgauucuccu

SEQ ID NO: 29445 - RNA, 20 nt, Artificial Sequence
  spacer sequence CTCN PAM
ucccucagccuucugaguag

SEQ ID NO: 29446 - RNA, 20 nt, Artificial Sequence
  spacer sequence CTCN PAM
cucagccuucugaguagcug

SEQ ID NO: 29447 - RNA, 20 nt, Artificial Sequence
  spacer sequence CTCN PAM
gccuucugaguagcugggau

SEQ ID NO: 29448 - RNA, 20 nt, Artificial Sequence
  spacer sequence CTCN PAM
gaaggcugagggaggagaau

SEQ ID NO: 29449 - RNA, 20 nt, Artificial Sequence
  spacer sequence CTCN PAM
gcuacuggggaggcugaggc

SEQ ID NO: 29450 - RNA, 20 nt, Artificial Sequence
  spacer sequence CTCN PAM
ccaguagcugagauuacagg

SEQ ID NO: 29451 - RNA, 20 nt, Artificial Sequence
  spacer sequence CTCN PAM
gccuccccaguagcugagau

SEQ ID NO: 29452 - RNA, 20 nt, Artificial Sequence
  spacer sequence CTCN PAM
ugccucagccuccccaguag

SEQ ID NO: 29453 - RNA, 20 nt, Artificial Sequence
  spacer sequence CTCN PAM
ugguuucaagcgauucuccu

SEQ ID NO: 29454 - RNA, 20 nt, Artificial Sequence
  spacer sequence CTCN PAM
gccuccugguuucaagcgau

SEQ ID NO: 29455 - RNA, 20 nt, Artificial Sequence
  spacer sequence CTCN PAM
ugugcuagccccgugccuuc

SEQ ID NO: 29456 - RNA, 20 nt, Artificial Sequence
  spacer sequence CTCN PAM
uguuuuucacgagaagcccc

SEQ ID NO: 29457 - RNA, 20 nt, Artificial Sequence
  spacer sequence CTCN PAM
ugaaaaacaagaguugccaa

SEQ ID NO: 29458 - RNA, 20 nt, Artificial Sequence
  spacer sequence CTCN PAM
ggacagcgcugggacaagcc

SEQ ID NO: 29459 - RNA, 20 nt, Artificial Sequence
  spacer sequence CTCN PAM
ugggggaagccucaggacag

SEQ ID NO: 29460 - RNA, 20 nt, Artificial Sequence
  spacer sequence CTCN PAM
gcccuaucggaacucauggg

SEQ ID NO: 29461 - RNA, 20 nt, Artificial Sequence
  spacer sequence CTCN PAM
gggcggccucugcccuaucg

SEQ ID NO: 29462 - RNA, 20 nt, Artificial Sequence
  spacer sequence CTCN PAM
uuccccugguccaagagugg

SEQ ID NO: 29463 - RNA, 20 nt, Artificial Sequence
  spacer sequence CTCN PAM
uggaccaggggaaagagaaa

SEQ ID NO: 29464 - RNA, 20 nt, Artificial Sequence
  spacer sequence CTCN PAM
aaagaaggauuuuugacugg

SEQ ID NO: 29465 - RNA, 20 nt, Artificial Sequence
  spacer sequence CTCN PAM
ccccaaagggggaugcgggg

SEQ ID NO: 29466 - RNA, 20 nt, Artificial Sequence
  spacer sequence CTCN PAM
cccgcaucccccuuuggggc

SEQ ID NO: 29467 - RNA, 20 nt, Artificial Sequence
  spacer sequence CTCN PAM
gguagggguggccccgcucc

SEQ ID NO: 29468 - RNA, 20 nt, Artificial Sequence
  spacer sequence CTCN PAM
uuccagguccgcaagcccag

SEQ ID NO: 29469 - RNA, 20 nt, Artificial Sequence
  spacer sequence CTCN PAM
gcccacccugcggccguuca

SEQ ID NO: 29470 - RNA, 20 nt, Artificial Sequence
  spacer sequence CTCN PAM
cugaacggccgcaggguggg

SEQ ID NO: 29471 - RNA, 20 nt, Artificial Sequence
  spacer sequence CTCN PAM
ggaagggggucguaggucac

SEQ ID NO: 29472 - RNA, 20 nt, Artificial Sequence
  spacer sequence CTCN PAM
guggggcucgggaagggggu

SEQ ID NO: 29473 - RNA, 20 nt, Artificial Sequence
  spacer sequence CTCN PAM
ucuccccaugccugcuuccc

SEQ ID NO: 29474 - RNA, 20 nt, Artificial Sequence
  spacer sequence CTCN PAM
ccaugccugcuucccgcccc

SEQ ID NO: 29475 - RNA, 20 nt, Artificial Sequence
  spacer sequence CTCN PAM
gaggaccaaugagcgcgcug

SEQ ID NO: 29476 - RNA, 20 nt, Artificial Sequence
  spacer sequence CTCN PAM
gagacgcccgucacgggcag

SEQ ID NO: 29477 - RNA, 20 nt, Artificial Sequence
  spacer sequence CTCN PAM
uugguccucggagacgcccg

SEQ ID NO: 29478 - RNA, 20 nt, Artificial Sequence
  spacer sequence CTCN PAM
ggcggggccaagcgccgacc

SEQ ID NO: 29479 - RNA, 20 nt, Artificial Sequence
  spacer sequence CTCN PAM
ggcgcccggccggguccaaa

SEQ ID NO: 29480 - RNA, 20 nt, Artificial Sequence
  spacer sequence CTCN PAM
aaucgucagcggcggcgggg

SEQ ID NO: 29481 - RNA, 20 nt, Artificial Sequence
  spacer sequence CTCN PAM
gcccgccccgccgccgcuga

SEQ ID NO: 29482 - RNA, 20 nt, Artificial Sequence
  spacer sequence CTCN PAM
cgaggaggcgugcccugcgg

SEQ ID NO: 29483 - RNA, 20 nt, Artificial Sequence
  spacer sequence CTCN PAM
cgaggacgacgugcccaccc

SEQ ID NO: 29484 - RNA, 20 nt, Artificial Sequence
  spacer sequence CTCN PAM
ucgcgaggacgacgugccca

SEQ ID NO: 29485 - RNA, 20 nt, Artificial Sequence
  spacer sequence CTCN PAM
cugcgccgccgcggacaccg

SEQ ID NO: 29486 - RNA, 20 nt, Artificial Sequence
  spacer sequence CTCN PAM
cccucccugcgccgccgcgg

SEQ ID NO: 29487 - RNA, 20 nt, Artificial Sequence
  spacer sequence CTCN PAM
cucccccucccugcgccgcc

SEQ ID NO: 29488 - RNA, 20 nt, Artificial Sequence
  spacer sequence CTCN PAM
cccuuccgcgcccgacacgc

SEQ ID NO: 29489 - RNA, 20 nt, Artificial Sequence
  spacer sequence CTCN PAM
cgggcgccccgggccgccuc

SEQ ID NO: 29490 - RNA, 20 nt, Artificial Sequence
  spacer sequence CTCN PAM
cucgcgggcgccccgggccg

SEQ ID NO: 29491 - RNA, 20 nt, Artificial Sequence
  spacer sequence CTCN PAM
cuucgccgccccgcgccuca

SEQ ID NO: 29492 - RNA, 20 nt, Artificial Sequence
  spacer sequence CTCN PAM
ccgcuccgccuccuccacac

SEQ ID NO: 29493 - RNA, 20 nt, Artificial Sequence
  spacer sequence CTCN PAM
gccuccuccacacgcgcggc

SEQ ID NO: 29494 - RNA, 20 nt, Artificial Sequence
  spacer sequence CTCN PAM
uccacacgcgcggcggccgc

SEQ ID NO: 29495 - RNA, 20 nt, Artificial Sequence
  spacer sequence CTCN PAM
acacgcgcggcggccgcggc

SEQ ID NO: 29496 - RNA, 20 nt, Artificial Sequence
  spacer sequence CTCN PAM
ccgcggccgccgcgcgugug

SEQ ID NO: 29497 - RNA, 20 nt, Artificial Sequence
  spacer sequence CTCN PAM
gggccgggggguucccgaag

SEQ ID NO: 29498 - RNA, 20 nt, Artificial Sequence
  spacer sequence CTCN PAM
gccgccgggagccccgugga

SEQ ID NO: 29499 - RNA, 20 nt, Artificial Sequence
  spacer sequence CTCN PAM
cggcggccgaggcggcgcag

SEQ ID NO: 29500 - RNA, 20 nt, Artificial Sequence
  spacer sequence CTCN PAM
acggggcucccggcggccga

SEQ ID NO: 29501 - RNA, 20 nt, Artificial Sequence
  spacer sequence CTCN PAM
gcguccgguccgcggggcgg

SEQ ID NO: 29502 - RNA, 20 nt, Artificial Sequence
  spacer sequence CTCN PAM
gggcggggcgcgcgcucggg

SEQ ID NO: 29503 - RNA, 20 nt, Artificial Sequence
  spacer sequence CTCN PAM
ggcagacguuugcggggagg

SEQ ID NO: 29504 - RNA, 20 nt, Artificial Sequence
  spacer sequence CTCN PAM
ccgcaaacgucugcccgagc

SEQ ID NO: 29505 - RNA, 20 nt, Artificial Sequence
  spacer sequence CTCN PAM
gggggcgcccagugcgggcc

SEQ ID NO: 29506 - RNA, 20 nt, Artificial Sequence
  spacer sequence CTCN PAM
cgggcgccgggcagcgacca

SEQ ID NO: 29507 - RNA, 20 nt, Artificial Sequence
  spacer sequence CTCN PAM
gggcuggucgcugcccggcg

SEQ ID NO: 29508 - RNA, 20 nt, Artificial Sequence
  spacer sequence CTCN PAM
gcucagggcuggucgcugcc

SEQ ID NO: 29509 - RNA, 20 nt, Artificial Sequence
  spacer sequence CTCN PAM
cgccgcggccaacagcuccg

SEQ ID NO: 29510 - RNA, 20 nt, Artificial Sequence
  spacer sequence CTCN PAM
cggacgcccccagccccccg

SEQ ID NO: 29511 - RNA, 20 nt, Artificial Sequence
  spacer sequence CTCN PAM
cccgggccggcgggagucgg

SEQ ID NO: 29512 - RNA, 20 nt, Artificial Sequence
  spacer sequence CTCN PAM
cgccggcccgggcgagcguu

SEQ ID NO: 29513 - RNA, 20 nt, Artificial Sequence
  spacer sequence CTCN PAM
cggggggcgccgacucccgc

SEQ ID NO: 29514 - RNA, 20 nt, Artificial Sequence
  spacer sequence CTCN PAM
gucguccgcggcggagcguu

SEQ ID NO: 29515 - RNA, 20 nt, Artificial Sequence
  spacer sequence CTCN PAM
gccgcggacgaccgagcgga

SEQ ID NO: 29516 - RNA, 20 nt, Artificial Sequence
  spacer sequence CTCN PAM
ugggacaggcggugggaccg

SEQ ID NO: 29517 - RNA, 20 nt, Artificial Sequence
  spacer sequence CTCN PAM
ggcgacgccccggucccacc

SEQ ID NO: 29518 - RNA, 20 nt, Artificial Sequence
  spacer sequence CTCN PAM
ccaggugugggggucccggg

SEQ ID NO: 29519 - RNA, 20 nt, Artificial Sequence
  spacer sequence CTCN PAM
aggugugggggucccggggg

SEQ ID NO: 29520 - RNA, 20 nt, Artificial Sequence
  spacer sequence CTCN PAM
gggccgcccaucccacaggc

SEQ ID NO: 29521 - RNA, 20 nt, Artificial Sequence
  spacer sequence CTCN PAM
gccguguucauacuuguccg

SEQ ID NO: 29522 - RNA, 20 nt, Artificial Sequence
  spacer sequence CTCN PAM
ggcccacggacaaguaugaa

SEQ ID NO: 29523 - RNA, 20 nt, Artificial Sequence
  spacer sequence CTCN PAM
ggggaccucaggcccacgga

SEQ ID NO: 29524 - RNA, 20 nt, Artificial Sequence
  spacer sequence CTCN PAM
ccaggguccccgaggacgaa

SEQ ID NO: 29525 - RNA, 20 nt, Artificial Sequence
  spacer sequence CTCN PAM
gggacccuggggaggccggc

SEQ ID NO: 29526 - RNA, 20 nt, Artificial Sequence
  spacer sequence CTCN PAM
caguucugaggcccgggucc

SEQ ID NO: 29527 - RNA, 20 nt, Artificial Sequence
  spacer sequence CTCN PAM
gaacugggagacggcccggu

SEQ ID NO: 29528 - RNA, 20 nt, Artificial Sequence
  spacer sequence CTCN PAM
cgucugagccgccgucccgg

SEQ ID NO: 29529 - RNA, 20 nt, Artificial Sequence
  spacer sequence CTCN PAM
gacgcgaguuccagugggac

SEQ ID NO: 29530 - RNA, 20 nt, Artificial Sequence
  spacer sequence CTCN PAM
cagccgggacugacguguag

SEQ ID NO: 29531 - RNA, 20 nt, Artificial Sequence
  spacer sequence CTCN PAM
aaaauuuuacaaagaaaaaa

SEQ ID NO: 29532 - RNA, 20 nt, Artificial Sequence
  spacer sequence CTCN PAM
cccgcggacucagggcuggc

SEQ ID NO: 29533 - RNA, 20 nt, Artificial Sequence
  spacer sequence CTCN PAM
gggcuggcggcgggacucca

SEQ ID NO: 29534 - RNA, 20 nt, Artificial Sequence
  spacer sequence CTCN PAM
aggacccuggguccagcaug

SEQ ID NO: 29535 - RNA, 20 nt, Artificial Sequence
  spacer sequence CTCN PAM
augcuggacccaggguccug

SEQ ID NO: 29536 - RNA, 20 nt, Artificial Sequence
  spacer sequence CTCN PAM
gugaacaugcccagcugcug

SEQ ID NO: 29537 - RNA, 20 nt, Artificial Sequence
  spacer sequence CTCN PAM
cccuccgugaacaugcccag

SEQ ID NO: 29538 - RNA, 20 nt, Artificial Sequence
  spacer sequence CTCN PAM
accgaggucaucuaccagcc

SEQ ID NO: 29539 - RNA, 20 nt, Artificial Sequence
  spacer sequence CTCN PAM
guggagucgaugcgguggau

SEQ ID NO: 29540 - RNA, 20 nt, Artificial Sequence
  spacer sequence CTCN PAM
ucggcaaguaccugaugggg

SEQ ID NO: 29541 - RNA, 20 nt, Artificial Sequence
  spacer sequence CTCN PAM
uacggcaaggugaaggaggu

SEQ ID NO: 29542 - RNA, 20 nt, Artificial Sequence
  spacer sequence CTCN PAM
uucaccuugccguaagagcc

SEQ ID NO: 29543 - RNA, 20 nt, Artificial Sequence
  spacer sequence CTCN PAM
gagacgcugugcaggagggc

SEQ ID NO: 29544 - RNA, 20 nt, Artificial Sequence
  spacer sequence CTCN PAM
gaguccagcaccuccuucac

SEQ ID NO: 29545 - RNA, 20 nt, Artificial Sequence
  spacer sequence CTCN PAM
ugcacagcgucuccgagucc

SEQ ID NO: 29546 - RNA, 20 nt, Artificial Sequence
  spacer sequence CTCN PAM
agaagaagaaguugcgaagg

SEQ ID NO: 29547 - RNA, 20 nt, Artificial Sequence
  spacer sequence CTCN PAM
ccguuggggauccuucgcaa

SEQ ID NO: 29548 - RNA, 20 nt, Artificial Sequence
  spacer sequence CTCN PAM
ccucccucccucccuuacuu

SEQ ID NO: 29549 - RNA, 20 nt, Artificial Sequence
  spacer sequence CTCN PAM
ucccucccucccuuacuucc

SEQ ID NO: 29550 - RNA, 20 nt, Artificial Sequence
  spacer sequence CTCN PAM
cucccucccuuacuuccucu

SEQ ID NO: 29551 - RNA, 20 nt, Artificial Sequence
  spacer sequence CTCN PAM
cucccuuacuuccucuuaac

SEQ ID NO: 29552 - RNA, 20 nt, Artificial Sequence
  spacer sequence CTCN PAM
cuuacuuccucuuaacaccc

SEQ ID NO: 29553 - RNA, 20 nt, Artificial Sequence
  spacer sequence CTCN PAM
uaacacccugagcuggaccc

SEQ ID NO: 29554 - RNA, 20 nt, Artificial Sequence
  spacer sequence CTCN PAM
ggguguuaagaggaaguaag

SEQ ID NO: 29555 - RNA, 20 nt, Artificial Sequence
  spacer sequence CTCN PAM
gugccagggagagcgugguu

SEQ ID NO: 29556 - RNA, 20 nt, Artificial Sequence
  spacer sequence CTCN PAM
cuggcacggaggacacaggc

SEQ ID NO: 29557 - RNA, 20 nt, Artificial Sequence
  spacer sequence CTCN PAM
cccuggcacggaggacacag

SEQ ID NO: 29558 - RNA, 20 nt, Artificial Sequence
  spacer sequence CTCN PAM
ggcaaggccaguugucgcag

SEQ ID NO: 29559 - RNA, 20 nt, Artificial Sequence
  spacer sequence CTCN PAM
uggacuccaguuaaaaugcc

SEQ ID NO: 29560 - RNA, 20 nt, Artificial Sequence
  spacer sequence CTCN PAM
aguuaaaaugcccugguagc

SEQ ID NO: 29561 - RNA, 20 nt, Artificial Sequence
  spacer sequence CTCN PAM
ugagaagggagcggccccca

SEQ ID NO: 29562 - RNA, 20 nt, Artificial Sequence
  spacer sequence CTCN PAM
ggaggguuucgcuaccaggg

SEQ ID NO: 29563 - RNA, 20 nt, Artificial Sequence
  spacer sequence CTCN PAM
cuucucaggaggguuucgcu

SEQ ID NO: 29564 - RNA, 20 nt, Artificial Sequence
  spacer sequence CTCN PAM
cccagcuguccaaggagcag

SEQ ID NO: 29565 - RNA, 20 nt, Artificial Sequence
  spacer sequence CTCN PAM
uuggacagcugggggagcca

SEQ ID NO: 29566 - RNA, 20 nt, Artificial Sequence
  spacer sequence CTCN PAM
gcuccuuggacagcuggggg

SEQ ID NO: 29567 - RNA, 20 nt, Artificial Sequence
  spacer sequence CTCN PAM
gggcccaaacaaacacaggc

SEQ ID NO: 29568 - RNA, 20 nt, Artificial Sequence
  spacer sequence CTCN PAM
cggggcccaaacaaacacag

SEQ ID NO: 29569 - RNA, 20 nt, Artificial Sequence
  spacer sequence CTCN PAM
gacaggauaaacaaaucaca

SEQ ID NO: 29570 - RNA, 20 nt, Artificial Sequence
  spacer sequence CTCN PAM
ugcugacugauaagccggug

SEQ ID NO: 29571 - RNA, 20 nt, Artificial Sequence
  spacer sequence CTCN PAM
uuugccagggaugugacgcu

SEQ ID NO: 29572 - RNA, 20 nt, Artificial Sequence
  spacer sequence CTCN PAM
ggcagggcuuccagccccgg

SEQ ID NO: 29573 - RNA, 20 nt, Artificial Sequence
  spacer sequence CTCN PAM
cucccgaauugcauccggaa

SEQ ID NO: 29574 - RNA, 20 nt, Artificial Sequence
  spacer sequence CTCN PAM
cgaauugcauccggaagacc

SEQ ID NO: 29575 - RNA, 20 nt, Artificial Sequence
  spacer sequence CTCN PAM
gcaucugugcgcggagaagc

SEQ ID NO: 29576 - RNA, 20 nt, Artificial Sequence
  spacer sequence CTCN PAM
gcgcacagaugcagaggcgu

SEQ ID NO: 29577 - RNA, 20 nt, Artificial Sequence
  spacer sequence CTCN PAM
uaccuagggcagcacuggcc

SEQ ID NO: 29578 - RNA, 20 nt, Artificial Sequence
  spacer sequence CTCN PAM
ggccggccagugcugcccua

SEQ ID NO: 29579 - RNA, 20 nt, Artificial Sequence
  spacer sequence CTCN PAM
cccagcugguggggguggcc

SEQ ID NO: 29580 - RNA, 20 nt, Artificial Sequence
  spacer sequence CTCN PAM
cagcugguggggguggccgg

SEQ ID NO: 29581 - RNA, 20 nt, Artificial Sequence
  spacer sequence CTCN PAM
uuucccagccuucuuaacuu

SEQ ID NO: 29582 - RNA, 20 nt, Artificial Sequence
  spacer sequence CTCN PAM
uguuuccaagaaaggaccuu

SEQ ID NO: 29583 - RNA, 20 nt, Artificial Sequence
  spacer sequence CTCN PAM
agggacuggcaaggacaccc

SEQ ID NO: 29584 - RNA, 20 nt, Artificial Sequence
  spacer sequence CTCN PAM
aggccuagcccagcagauaa

SEQ ID NO: 29585 - RNA, 20 nt, Artificial Sequence
  spacer sequence CTCN PAM
uuccaaggucauggugcccu

SEQ ID NO: 29586 - RNA, 20 nt, Artificial Sequence
  spacer sequence CTCN PAM
ccggaccuccuuccaagguc

SEQ ID NO: 29587 - RNA, 20 nt, Artificial Sequence
  spacer sequence CTCN PAM
caccuuccuccugcucaggg

SEQ ID NO: 29588 - RNA, 20 nt, Artificial Sequence
  spacer sequence CTCN PAM
ccuuccuccugcucaggggc

SEQ ID NO: 29589 - RNA, 20 nt, Artificial Sequence
  spacer sequence CTCN PAM
ugcucaggggcccuggggcu

SEQ ID NO: 29590 - RNA, 20 nt, Artificial Sequence
  spacer sequence CTCN PAM
ggggcccuggggcuccugcc

SEQ ID NO: 29591 - RNA, 20 nt, Artificial Sequence
  spacer sequence CTCN PAM
ugccgugucugcucucaccu

SEQ ID NO: 29592 - RNA, 20 nt, Artificial Sequence
  spacer sequence CTCN PAM
caccucucuccugcucaggg

SEQ ID NO: 29593 - RNA, 20 nt, Artificial Sequence
  spacer sequence CTCN PAM
ccucucuccugcucaggggc

SEQ ID NO: 29594 - RNA, 20 nt, Artificial Sequence
  spacer sequence CTCN PAM
cuccugcucaggggcccugg

SEQ ID NO: 29595 - RNA, 20 nt, Artificial Sequence
  spacer sequence CTCN PAM
ccugcucaggggcccugggg

SEQ ID NO: 29596 - RNA, 20 nt, Artificial Sequence
  spacer sequence CTCN PAM
ugcucaggggcccuggggcu

SEQ ID NO: 29597 - RNA, 20 nt, Artificial Sequence
  spacer sequence CTCN PAM
ggggcccuggggcucacgua

SEQ ID NO: 29598 - RNA, 20 nt, Artificial Sequence
  spacer sequence CTCN PAM
cguacauuuuuuuuuuuuuu

SEQ ID NO: 29599 - RNA, 20 nt, Artificial Sequence
  spacer sequence CTCN PAM
aaaaaaaaaaaaaaaaaaug

SEQ ID NO: 29600 - RNA, 20 nt, Artificial Sequence
  spacer sequence CTCN PAM
gucucaaaaaaaaaaaaaaa

SEQ ID NO: 29601 - RNA, 20 nt, Artificial Sequence
  spacer sequence CTCN PAM
cucuguuccccaggcuggag

SEQ ID NO: 29602 - RNA, 20 nt, Artificial Sequence
  spacer sequence CTCN PAM
guuccccaggcuggagugca

SEQ ID NO: 29603 - RNA, 20 nt, Artificial Sequence
  spacer sequence CTCN PAM
agccuggggaacagagcgag

SEQ ID NO: 29604 - RNA, 20 nt, Artificial Sequence
  spacer sequence CTCN PAM
cugcaagcuccgccucccgg

SEQ ID NO: 29605 - RNA, 20 nt, Artificial Sequence
  spacer sequence CTCN PAM
gccucccggguucaugccau

SEQ ID NO: 29606 - RNA, 20 nt, Artificial Sequence
  spacer sequence CTCN PAM
cggguucaugccauucuccu

SEQ ID NO: 29607 - RNA, 20 nt, Artificial Sequence
  spacer sequence CTCN PAM
ugccucagccucccgaguag

SEQ ID NO: 29608 - RNA, 20 nt, Artificial Sequence
  spacer sequence CTCN PAM
gccucccgaguagcugggac

SEQ ID NO: 29609 - RNA, 20 nt, Artificial Sequence
  spacer sequence CTCN PAM
cgaguagcugggacuacagg

SEQ ID NO: 29610 - RNA, 20 nt, Artificial Sequence
  spacer sequence CTCN PAM
ggaggcugaggcaggagaau

SEQ ID NO: 29611 - RNA, 20 nt, Artificial Sequence
  spacer sequence CTCN PAM
acugaaaaauacaaaaaauu

SEQ ID NO: 29612 - RNA, 20 nt, Artificial Sequence
  spacer sequence CTCN PAM
aucuccugaccucgugaucc

SEQ ID NO: 29613 - RNA, 20 nt, Artificial Sequence
  spacer sequence CTCN PAM
ugaccucgugauccgcccgc

SEQ ID NO: 29614 - RNA, 20 nt, Artificial Sequence
  spacer sequence CTCN PAM
ugauccgcccgccucggccu

SEQ ID NO: 29615 - RNA, 20 nt, Artificial Sequence
  spacer sequence CTCN PAM
gccucccaaagugcugguac

SEQ ID NO: 29616 - RNA, 20 nt, Artificial Sequence
  spacer sequence CTCN PAM
caaagugcugguacuacagg

SEQ ID NO: 29617 - RNA, 20 nt, Artificial Sequence
  spacer sequence CTCN PAM
cgccuguaguaccagcacuu

SEQ ID NO: 29618 - RNA, 20 nt, Artificial Sequence
  spacer sequence CTCN PAM
aaaaaaaaaaaaaaaaaaaa

SEQ ID NO: 29619 - RNA, 20 nt, Artificial Sequence
  spacer sequence CTCN PAM
gucucaaaaaaaaaaaaaaa

SEQ ID NO: 29620 - RNA, 20 nt, Artificial Sequence
  spacer sequence CTCN PAM
uguugcucaggcuggagugc

SEQ ID NO: 29621 - RNA, 20 nt, Artificial Sequence
  spacer sequence CTCN PAM
ggcuggagugcaguggagug

SEQ ID NO: 29622 - RNA, 20 nt, Artificial Sequence
  spacer sequence CTCN PAM
agccugagcaacaagaguga

SEQ ID NO: 29623 - RNA, 20 nt, Artificial Sequence
  spacer sequence CTCN PAM
acugcacuccagccugagca

SEQ ID NO: 29624 - RNA, 20 nt, Artificial Sequence
  spacer sequence CTCN PAM
cugcaaucuccgcccccugg

SEQ ID NO: 29625 - RNA, 20 nt, Artificial Sequence
  spacer sequence CTCN PAM
gcccccuggguucaagugau

SEQ ID NO: 29626 - RNA, 20 nt, Artificial Sequence
  spacer sequence CTCN PAM
ugccucagccucccgaguag

SEQ ID NO: 29627 - RNA, 20 nt, Artificial Sequence
  spacer sequence CTCN PAM
gccucccgaguagcugggau

SEQ ID NO: 29628 - RNA, 20 nt, Artificial Sequence
  spacer sequence CTCN PAM
cgaguagcugggauuacagg

SEQ ID NO: 29629 - RNA, 20 nt, Artificial Sequence
  spacer sequence CTCN PAM
ggaggcugaggcacgagaau

SEQ ID NO: 29630 - RNA, 20 nt, Artificial Sequence
  spacer sequence CTCN PAM
acuaaaaaaaaaaaaaaaaa

SEQ ID NO: 29631 - RNA, 20 nt, Artificial Sequence
  spacer sequence CTCN PAM
ugauccaccugccucagccu

SEQ ID NO: 29632 - RNA, 20 nt, Artificial Sequence
  spacer sequence CTCN PAM
gccucccaaagugcugggau

SEQ ID NO: 29633 - RNA, 20 nt, Artificial Sequence
  spacer sequence CTCN PAM
caaagugcugggauuaaagg

SEQ ID NO: 29634 - RNA, 20 nt, Artificial Sequence
  spacer sequence CTCN PAM
cgccuuuaaucccagcacuu

SEQ ID NO: 29635 - RNA, 20 nt, Artificial Sequence
  spacer sequence CTCN PAM
gaaguuuguacucuggagcu

SEQ ID NO: 29636 - RNA, 20 nt, Artificial Sequence
  spacer sequence CTCN PAM
ggagcuggagcagucagggu

SEQ ID NO: 29637 - RNA, 20 nt, Artificial Sequence
  spacer sequence CTCN PAM
agaguacaaacuucagagcc

SEQ ID NO: 29638 - RNA, 20 nt, Artificial Sequence
  spacer sequence CTCN PAM
agcuccagaguacaaacuuc

SEQ ID NO: 29639 - RNA, 20 nt, Artificial Sequence
  spacer sequence CTCN PAM
cauuuaacccugacugcucc

SEQ ID NO: 29640 - RNA, 20 nt, Artificial Sequence
  spacer sequence CTCN PAM
uggaaacacacccuucccag

SEQ ID NO: 29641 - RNA, 20 nt, Artificial Sequence
  spacer sequence CTCN PAM
gugcccagucuggacccggg

SEQ ID NO: 29642 - RNA, 20 nt, Artificial Sequence
  spacer sequence CTCN PAM
aggcacuggccacaccuucu

SEQ ID NO: 29643 - RNA, 20 nt, Artificial Sequence
  spacer sequence CTCN PAM
acugacucaaggcacuggcc

SEQ ID NO: 29644 - RNA, 20 nt, Artificial Sequence
  spacer sequence CTCN PAM
gugagauggguuggucaggg

SEQ ID NO: 29645 - RNA, 20 nt, Artificial Sequence
  spacer sequence CTCN PAM
cagagaccaggcacaggcaa

SEQ ID NO: 29646 - RNA, 20 nt, Artificial Sequence
  spacer sequence CTCN PAM
gccuagccccugaccaaccc

SEQ ID NO: 29647 - RNA, 20 nt, Artificial Sequence
  spacer sequence CTCN PAM
gugagauggguuggucaggg

SEQ ID NO: 29648 - RNA, 20 nt, Artificial Sequence
  spacer sequence CTCN PAM
cagagaccaggcacaggcuc

SEQ ID NO: 29649 - RNA, 20 nt, Artificial Sequence
  spacer sequence CTCN PAM
gccuagccccugaccaaccc

SEQ ID NO: 29650 - RNA, 20 nt, Artificial Sequence
  spacer sequence CTCN PAM
aaaggggccagugacagucu

SEQ ID NO: 29651 - RNA, 20 nt, Artificial Sequence
  spacer sequence CTCN PAM
cucccagcagugagaaaccc

SEQ ID NO: 29652 - RNA, 20 nt, Artificial Sequence
  spacer sequence CTCN PAM
cccagcagugagaaacccac

SEQ ID NO: 29653 - RNA, 20 nt, Artificial Sequence
  spacer sequence CTCN PAM
cagcagugagaaacccacgc

SEQ ID NO: 29654 - RNA, 20 nt, Artificial Sequence
  spacer sequence CTCN PAM
cugcugggagagagacuguc

SEQ ID NO: 29655 - RNA, 20 nt, Artificial Sequence
  spacer sequence CTCN PAM
cgccuguaaucccagcacuu

SEQ ID NO: 29656 - RNA, 20 nt, Artificial Sequence
  spacer sequence CTCN PAM
caaagugcugggauuacagg

SEQ ID NO: 29657 - RNA, 20 nt, Artificial Sequence
  spacer sequence CTCN PAM
gccucccaaagugcugggau

SEQ ID NO: 29658 - RNA, 20 nt, Artificial Sequence
  spacer sequence CTCN PAM
ggcgauccacccaccucagc

SEQ ID NO: 29659 - RNA, 20 nt, Artificial Sequence
  spacer sequence CTCN PAM
ugaccucaggcgauccaccc

SEQ ID NO: 29660 - RNA, 20 nt, Artificial Sequence
  spacer sequence CTCN PAM
aacuccugaccucaggcgau

SEQ ID NO: 29661 - RNA, 20 nt, Artificial Sequence
  spacer sequence CTCN PAM
acuaaaaauacaaaaguuag

SEQ ID NO: 29662 - RNA, 20 nt, Artificial Sequence
  spacer sequence CTCN PAM
gcuaacuuuuguauuuuuag

SEQ ID NO: 29663 - RNA, 20 nt, Artificial Sequence
  spacer sequence CTCN PAM
ggaggcugaggcagaacauu

SEQ ID NO: 29664 - RNA, 20 nt, Artificial Sequence
  spacer sequence CTCN PAM
cgaguagcugggauuacagg

SEQ ID NO: 29665 - RNA, 20 nt, Artificial Sequence
  spacer sequence CTCN PAM
gccucccgaguagcugggau

SEQ ID NO: 29666 - RNA, 20 nt, Artificial Sequence
  spacer sequence CTCN PAM
agcaauguucugccucagcc

SEQ ID NO: 29667 - RNA, 20 nt, Artificial Sequence
  spacer sequence CTCN PAM
caggcuccagcaauguucug

SEQ ID NO: 29668 - RNA, 20 nt, Artificial Sequence
  spacer sequence CTCN PAM
gccucccaggcuccagcaau

SEQ ID NO: 29669 - RNA, 20 nt, Artificial Sequence
  spacer sequence CTCN PAM
ggucaccgcaagcuccgccu

SEQ ID NO: 29670 - RNA, 20 nt, Artificial Sequence
  spacer sequence CTCN PAM
agccugggcgacacagcgag

SEQ ID NO: 29671 - RNA, 20 nt, Artificial Sequence
  spacer sequence CTCN PAM
cugugucgcccaggcuggag

SEQ ID NO: 29672 - RNA, 20 nt, Artificial Sequence
  spacer sequence CTCN PAM
gucucaaaaauaaauaaaua

SEQ ID NO: 29673 - RNA, 20 nt, Artificial Sequence
  spacer sequence CTCN PAM
aaaauaaauaaauaaauaaa

SEQ ID NO: 29674 - RNA, 20 nt, Artificial Sequence
  spacer sequence CTCN PAM
agccagauuuauuuauuuau

SEQ ID NO: 29675 - RNA, 20 nt, Artificial Sequence
  spacer sequence CTCN PAM
agcgucugucuucccauuga

SEQ ID NO: 29676 - RNA, 20 nt, Artificial Sequence
  spacer sequence CTCN PAM
cagucaggcuuccacccucc

SEQ ID NO: 29677 - RNA, 20 nt, Artificial Sequence
  spacer sequence CTCN PAM
cacagucaggcuuccacccu

SEQ ID NO: 29678 - RNA, 20 nt, Artificial Sequence
  spacer sequence CTCN PAM
cucucacagucaggcuucca

SEQ ID NO: 29679 - RNA, 20 nt, Artificial Sequence
  spacer sequence CTCN PAM
acugacuguucaggaaagca

SEQ ID NO: 29680 - RNA, 20 nt, Artificial Sequence
  spacer sequence CTCN PAM
uccacugacuguucaggaaa

SEQ ID NO: 29681 - RNA, 20 nt, Artificial Sequence
  spacer sequence CTCN PAM
caggaccuccuccacugacu

SEQ ID NO: 29682 - RNA, 20 nt, Artificial Sequence
  spacer sequence CTCN PAM
ggugagcaccugaacgguag

SEQ ID NO: 29683 - RNA, 20 nt, Artificial Sequence
  spacer sequence CTCN PAM
ccugagcucccaggaccucc

SEQ ID NO: 29684 - RNA, 20 nt, Artificial Sequence
  spacer sequence CTCN PAM
gcccuaccguucaggugcuc

SEQ ID NO: 29685 - RNA, 20 nt, Artificial Sequence
  spacer sequence CTCN PAM
ggcucugcccuaccguucag

SEQ ID NO: 29686 - RNA, 20 nt, Artificial Sequence
  spacer sequence CTCN PAM
accaagacccucaggcucug

SEQ ID NO: 29687 - RNA, 20 nt, Artificial Sequence
  spacer sequence CTCN PAM
caggcacugggccagacuag

SEQ ID NO: 29688 - RNA, 20 nt, Artificial Sequence
  spacer sequence CTCN PAM
cguucucccaggcacugggc

SEQ ID NO: 29689 - RNA, 20 nt, Artificial Sequence
  spacer sequence CTCN PAM
guguucccucccguucuccc

SEQ ID NO: 29690 - RNA, 20 nt, Artificial Sequence
  spacer sequence CTCN PAM
cugccuccguguucccuccc

SEQ ID NO: 29691 - RNA, 20 nt, Artificial Sequence
  spacer sequence CTCN PAM
gccucccugccuccguguuc

SEQ ID NO: 29692 - RNA, 20 nt, Artificial Sequence
  spacer sequence CTCN PAM
cuucaaggcaguggggucaa

SEQ ID NO: 29693 - RNA, 20 nt, Artificial Sequence
  spacer sequence CTCN PAM
cuaguguucagcguccaauu

SEQ ID NO: 29694 - RNA, 20 nt, Artificial Sequence
  spacer sequence CTCN PAM
gggccaggaugaaauuggac

SEQ ID NO: 29695 - RNA, 20 nt, Artificial Sequence
  spacer sequence CTCN PAM
ucccagggggccccgcaagg

SEQ ID NO: 29696 - RNA, 20 nt, Artificial Sequence
  spacer sequence CTCN PAM
ccccucaucccagggggccc

SEQ ID NO: 29697 - RNA, 20 nt, Artificial Sequence
  spacer sequence CTCN PAM
ugauggcagacagugaccag

SEQ ID NO: 29698 - RNA, 20 nt, Artificial Sequence
  spacer sequence CTCN PAM
ugaaucacagcuguaagcgg

SEQ ID NO: 29699 - RNA, 20 nt, Artificial Sequence
  spacer sequence CTCN PAM
agcccccugggugcugccag

SEQ ID NO: 29700 - RNA, 20 nt, Artificial Sequence
  spacer sequence CTCN PAM
uauucugggagcuggugugu

SEQ ID NO: 29701 - RNA, 20 nt, Artificial Sequence
  spacer sequence CTCN PAM
cagaauaggaggacccccug

SEQ ID NO: 29702 - RNA, 20 nt, Artificial Sequence
  spacer sequence CTCN PAM
agucagaacacaccagcucc

SEQ ID NO: 29703 - RNA, 20 nt, Artificial Sequence
  spacer sequence CTCN PAM
gcacauggcagccuccaguc

SEQ ID NO: 29704 - RNA, 20 nt, Artificial Sequence
  spacer sequence CTCN PAM
uugacagcacucugcacaug

SEQ ID NO: 29705 - RNA, 20 nt, Artificial Sequence
  spacer sequence CTCN PAM
gggcugggcaguggacaccc

SEQ ID NO: 29706 - RNA, 20 nt, Artificial Sequence
  spacer sequence CTCN PAM
uuugugugugggaaguuuaa

SEQ ID NO: 29707 - RNA, 20 nt, Artificial Sequence
  spacer sequence CTCN PAM
gcucagauugugucucgcag

SEQ ID NO: 29708 - RNA, 20 nt, Artificial Sequence
  spacer sequence CTCN PAM
gauugugucucgcagcgagu

SEQ ID NO: 29709 - RNA, 20 nt, Artificial Sequence
  spacer sequence CTCN PAM
cagcgagugucuggaaccuu

SEQ ID NO: 29710 - RNA, 20 nt, Artificial Sequence
  spacer sequence CTCN PAM
cugcgagacacaaucugagc

SEQ ID NO: 29711 - RNA, 20 nt, Artificial Sequence
  spacer sequence CTCN PAM
ggcguccgguccuccaguug

SEQ ID NO: 29712 - RNA, 20 nt, Artificial Sequence
  spacer sequence CTCN PAM
aguugguguggaaagcgugg

SEQ ID NO: 29713 - RNA, 20 nt, Artificial Sequence
  spacer sequence CTCN PAM
aucugccccaacccaccccc

SEQ ID NO: 29714 - RNA, 20 nt, Artificial Sequence
  spacer sequence CTCN PAM
cgccggcuccaucugcccca

SEQ ID NO: 29715 - RNA, 20 nt, Artificial Sequence
  spacer sequence CTCN PAM
ucccuuccuucccagaaagg

SEQ ID NO: 29716 - RNA, 20 nt, Artificial Sequence
  spacer sequence CTCN PAM
agggcugccuuucugggaag

SEQ ID NO: 29717 - RNA, 20 nt, Artificial Sequence
  spacer sequence CTCN PAM
caccggcaaaaaguauaauc

SEQ ID NO: 29718 - RNA, 20 nt, Artificial Sequence
  spacer sequence CTCN PAM
ccggcaaaaaguauaaucuu

SEQ ID NO: 29719 - RNA, 20 nt, Artificial Sequence
  spacer sequence CTCN PAM
uugaugcuuuuuggaacuuu

SEQ ID NO: 29720 - RNA, 20 nt, Artificial Sequence
  spacer sequence CTCN PAM
uuuuaacucauugaugcuuu

SEQ ID NO: 29721 - RNA, 20 nt, Artificial Sequence
  spacer sequence CTCN PAM
caaagugcugggauuacagg

SEQ ID NO: 29722 - RNA, 20 nt, Artificial Sequence
  spacer sequence CTCN PAM
ggugauccacccgccuuggc

SEQ ID NO: 29723 - RNA, 20 nt, Artificial Sequence
  spacer sequence CTCN PAM
caaccucgggugauccaccc

SEQ ID NO: 29724 - RNA, 20 nt, Artificial Sequence
  spacer sequence CTCN PAM
acuaaaaauacaaaauuagc

SEQ ID NO: 29725 - RNA, 20 nt, Artificial Sequence
  spacer sequence CTCN PAM
gcuaauuuuguauuuuuagu

SEQ ID NO: 29726 - RNA, 20 nt, Artificial Sequence
  spacer sequence CTCN PAM
ggaggcugaggcaggagaau

SEQ ID NO: 29727 - RNA, 20 nt, Artificial Sequence
  spacer sequence CTCN PAM
agaguagcugggauuacagg

SEQ ID NO: 29728 - RNA, 20 nt, Artificial Sequence
  spacer sequence CTCN PAM
cuuggaagcccccaggaaaa

SEQ ID NO: 29729 - RNA, 20 nt, Artificial Sequence
  spacer sequence CTCN PAM
ccgggagucacguuuuccca

SEQ ID NO: 29730 - RNA, 20 nt, Artificial Sequence
  spacer sequence CTCN PAM
gggagucacguuuucccagc

SEQ ID NO: 29731 - RNA, 20 nt, Artificial Sequence
  spacer sequence CTCN PAM
cggagagaagcauguugacu

SEQ ID NO: 29732 - RNA, 20 nt, Artificial Sequence
  spacer sequence CTCN PAM
caguggacgugggagccgca

SEQ ID NO: 29733 - RNA, 20 nt, Artificial Sequence
  spacer sequence CTCN PAM
cacguccacugggaggcugg

SEQ ID NO: 29734 - RNA, 20 nt, Artificial Sequence
  spacer sequence CTCN PAM
accgcguccaguccaucccc

SEQ ID NO: 29735 - RNA, 20 nt, Artificial Sequence
  spacer sequence CTCN PAM
gccccugcuccaggcuaggg

SEQ ID NO: 29736 - RNA, 20 nt, Artificial Sequence
  spacer sequence CTCN PAM
aggcuagggcucucugccca

SEQ ID NO: 29737 - RNA, 20 nt, Artificial Sequence
  spacer sequence CTCN PAM
cugcccacccaugcuggaua

SEQ ID NO: 29738 - RNA, 20 nt, Artificial Sequence
  spacer sequence CTCN PAM
gcccacccaugcuggauaac

SEQ ID NO: 29739 - RNA, 20 nt, Artificial Sequence
  spacer sequence CTCN PAM
ugcugguuauccagcauggg

SEQ ID NO: 29740 - RNA, 20 nt, Artificial Sequence
  spacer sequence CTCN PAM
cgucugugcacuguccuccu

SEQ ID NO: 29741 - RNA, 20 nt, Artificial Sequence
  spacer sequence CTCN PAM
gccccagccccacgccccau

SEQ ID NO: 29742 - RNA, 20 nt, Artificial Sequence
  spacer sequence CTCN PAM
cccaacccaagggcaacuuc

SEQ ID NO: 29743 - RNA, 20 nt, Artificial Sequence
  spacer sequence CTCN PAM
ggccagcagcaccccucccc

SEQ ID NO: 29744 - RNA, 20 nt, Artificial Sequence
  spacer sequence CTCN PAM
gaagcugcugugaccacucc

SEQ ID NO: 29745 - RNA, 20 nt, Artificial Sequence
  spacer sequence CTCN PAM
cagaagcugcugugaccacu

SEQ ID NO: 29746 - RNA, 20 nt, Artificial Sequence
  spacer sequence CTCN PAM
ucucagaagcugcugugacc

SEQ ID NO: 29747 - RNA, 20 nt, Artificial Sequence
  spacer sequence CTCN PAM
caaggcugggcagacuccuc

SEQ ID NO: 29748 - RNA, 20 nt, Artificial Sequence
  spacer sequence CTCN PAM
cacccccgccccgcccaugc

SEQ ID NO: 29749 - RNA, 20 nt, Artificial Sequence
  spacer sequence CTCN PAM
cccacccccgccccgcccau

SEQ ID NO: 29750 - RNA, 20 nt, Artificial Sequence
  spacer sequence CTCN PAM
gacuccaccagcaagcagca

SEQ ID NO: 29751 - RNA, 20 nt, Artificial Sequence
  spacer sequence CTCN PAM
accagcaagcagcaguacca

SEQ ID NO: 29752 - RNA, 20 nt, Artificial Sequence
  spacer sequence CTCN PAM
gggggccccuccuccccacc

SEQ ID NO: 29753 - RNA, 20 nt, Artificial Sequence
  spacer sequence CTCN PAM
uccccacccaccgcccuacc

SEQ ID NO: 29754 - RNA, 20 nt, Artificial Sequence
  spacer sequence CTCN PAM
ccacccaccgcccuacccuu

SEQ ID NO: 29755 - RNA, 20 nt, Artificial Sequence
  spacer sequence CTCN PAM
cccugcuucccuccucuggu

SEQ ID NO: 29756 - RNA, 20 nt, Artificial Sequence
  spacer sequence CTCN PAM
cugcuucccuccucuggucc

SEQ ID NO: 29757 - RNA, 20 nt, Artificial Sequence
  spacer sequence CTCN PAM
ucugguccaugcuggagagg

SEQ ID NO: 29758 - RNA, 20 nt, Artificial Sequence
  spacer sequence CTCN PAM
gguccaugcuggagaggugg

SEQ ID NO: 29759 - RNA, 20 nt, Artificial Sequence
  spacer sequence CTCN PAM
agcauggaccagaggaggga

SEQ ID NO: 29760 - RNA, 20 nt, Artificial Sequence
  spacer sequence CTCN PAM
ccagcauggaccagaggagg

SEQ ID NO: 29761 - RNA, 20 nt, Artificial Sequence
  spacer sequence CTCN PAM
cuggggccaccucuccagca

SEQ ID NO: 29762 - RNA, 20 nt, Artificial Sequence
  spacer sequence CTCN PAM
gggaggggccuugccgcugg

SEQ ID NO: 29763 - RNA, 20 nt, Artificial Sequence
  spacer sequence CTCN PAM
cagaggcggacucacugggg

SEQ ID NO: 29764 - RNA, 20 nt, Artificial Sequence
  spacer sequence CTCN PAM
agcggcaaggccccucccag

SEQ ID NO: 29765 - RNA, 20 nt, Artificial Sequence
  spacer sequence CTCN PAM
ccugccuccagcggcaaggc

SEQ ID NO: 29766 - RNA, 20 nt, Artificial Sequence
  spacer sequence CTCN PAM
aggccccguggacacgcgcu

SEQ ID NO: 29767 - RNA, 20 nt, Artificial Sequence
  spacer sequence CTCN PAM
ccaggccccguggacacgcg

SEQ ID NO: 29768 - RNA, 20 nt, Artificial Sequence
  spacer sequence CTCN PAM
cugggccgccuagggggggg

SEQ ID NO: 29769 - RNA, 20 nt, Artificial Sequence
  spacer sequence CTCN PAM
aucuacugaaaaauaccugc

SEQ ID NO: 29770 - RNA, 20 nt, Artificial Sequence
  spacer sequence CTCN PAM
gcagguauuuuucaguagau

SEQ ID NO: 29771 - RNA, 20 nt, Artificial Sequence
  spacer sequence CTCN PAM
cggcagguauuuuucaguag

SEQ ID NO: 29772 - RNA, 20 nt, Artificial Sequence
  spacer sequence CTCN PAM
uggggggcaucccccuccuc

SEQ ID NO: 29773 - RNA, 20 nt, Artificial Sequence
  spacer sequence CTCN PAM
uccugcuccgugcucucacu

SEQ ID NO: 29774 - RNA, 20 nt, Artificial Sequence
  spacer sequence CTCN PAM
ugcuccgugcucucacuggc

SEQ ID NO: 29775 - RNA, 20 nt, Artificial Sequence
  spacer sequence CTCN PAM
gugcucucacuggcugcccg

SEQ ID NO: 29776 - RNA, 20 nt, Artificial Sequence
  spacer sequence CTCN PAM
cacuggcugcccgcugccgc

SEQ ID NO: 29777 - RNA, 20 nt, Artificial Sequence
  spacer sequence CTCN PAM
cuggcugcccgcugccgcug

SEQ ID NO: 29778 - RNA, 20 nt, Artificial Sequence
  spacer sequence CTCN PAM
acccgcuccacacacacaca

SEQ ID NO: 29779 - RNA, 20 nt, Artificial Sequence
  spacer sequence CTCN PAM
acacacacacagaaugccua

SEQ ID NO: 29780 - RNA, 20 nt, Artificial Sequence
  spacer sequence CTCN PAM
cacacacacgccugugcccc

SEQ ID NO: 29781 - RNA, 20 nt, Artificial Sequence
  spacer sequence CTCN PAM
uacacacagaacaccugugg

SEQ ID NO: 29782 - RNA, 20 nt, Artificial Sequence
  spacer sequence CTCN PAM
gucucacacacacaggagug

SEQ ID NO: 29783 - RNA, 20 nt, Artificial Sequence
  spacer sequence CTCN PAM
cacacacaggagugggcccu

SEQ ID NO: 29784 - RNA, 20 nt, Artificial Sequence
  spacer sequence CTCN PAM
ugugugugugagacagagac

SEQ ID NO: 29785 - RNA, 20 nt, Artificial Sequence
  spacer sequence CTCN PAM
ccgggucaggugggugcgga

SEQ ID NO: 29786 - RNA, 20 nt, Artificial Sequence
  spacer sequence CTCN PAM
aggguguacacacagccacu

SEQ ID NO: 29787 - RNA, 20 nt, Artificial Sequence
  spacer sequence CTCN PAM
ccuguacuccaggguguaca

SEQ ID NO: 29788 - RNA, 20 nt, Artificial Sequence
  spacer sequence CTCN PAM
guuuucucaccuguacucca

SEQ ID NO: 29789 - RNA, 20 nt, Artificial Sequence
  spacer sequence CTCN PAM
gugccucaguuuucucaccu

SEQ ID NO: 29790 - RNA, 20 nt, Artificial Sequence
  spacer sequence CTCN PAM
ucccuccgugccucaguuuu

SEQ ID NO: 29791 - RNA, 20 nt, Artificial Sequence
  spacer sequence CTCN PAM
ggucccagcaccucuucccu

SEQ ID NO: 29792 - RNA, 20 nt, Artificial Sequence
  spacer sequence CTCN PAM
cuggucccagcaccucuucc

SEQ ID NO: 29793 - RNA, 20 nt, Artificial Sequence
  spacer sequence CTCN PAM
ggcucucuggucccagcacc

SEQ ID NO: 29794 - RNA, 20 nt, Artificial Sequence
  spacer sequence CTCN PAM
cuuccuggcccugcccugcu

SEQ ID NO: 29795 - RNA, 20 nt, Artificial Sequence
  spacer sequence CTCN PAM
cucgcuuccuggcccugccc

SEQ ID NO: 29796 - RNA, 20 nt, Artificial Sequence
  spacer sequence CTCN PAM
ggcaccgauagugccuugug

SEQ ID NO: 29797 - RNA, 20 nt, Artificial Sequence
  spacer sequence CTCN PAM
uaagggcguguccuggacac

SEQ ID NO: 29798 - RNA, 20 nt, Artificial Sequence
  spacer sequence CTCN PAM
ugccuuccguaguuucagcc

SEQ ID NO: 29799 - RNA, 20 nt, Artificial Sequence
  spacer sequence CTCN PAM
caugccuuccguaguuucag

SEQ ID NO: 29800 - RNA, 20 nt, Artificial Sequence
  spacer sequence CTCN PAM
cucaugccuuccguaguuuc

SEQ ID NO: 29801 - RNA, 20 nt, Artificial Sequence
  spacer sequence CTCN PAM
uuggcccccaccagccugua

SEQ ID NO: 29802 - RNA, 20 nt, Artificial Sequence
  spacer sequence CTCN PAM
ucguuggcccccaccagccu

SEQ ID NO: 29803 - RNA, 20 nt, Artificial Sequence
  spacer sequence CTCN PAM
ccucguuggcccccaccagc

SEQ ID NO: 29804 - RNA, 20 nt, Artificial Sequence
  spacer sequence CTCN PAM
cucuccucguuggcccccac

SEQ ID NO: 29805 - RNA, 20 nt, Artificial Sequence
  spacer sequence CTCN PAM
cccucuccucguuggccccc

SEQ ID NO: 29806 - RNA, 20 nt, Artificial Sequence
  spacer sequence CTCN PAM
cucccucuccucguuggccc

SEQ ID NO: 29807 - RNA, 20 nt, Artificial Sequence
  spacer sequence CTCN PAM
ccugccagcuccacccuggu

SEQ ID NO: 29808 - RNA, 20 nt, Artificial Sequence
  spacer sequence CTCN PAM
ugccagcuccacccuggucu

SEQ ID NO: 29809 - RNA, 20 nt, Artificial Sequence
  spacer sequence CTCN PAM
acccuggucuggagagcgcu

SEQ ID NO: 29810 - RNA, 20 nt, Artificial Sequence
  spacer sequence CTCN PAM
agaccaggguggagcuggca

SEQ ID NO: 29811 - RNA, 20 nt, Artificial Sequence
  spacer sequence CTCN PAM
ccagaccaggguggagcugg

SEQ ID NO: 29812 - RNA, 20 nt, Artificial Sequence
  spacer sequence CTCN PAM
gcccccuucucccaacagcc

SEQ ID NO: 29813 - RNA, 20 nt, Artificial Sequence
  spacer sequence CTCN PAM
caacagccuccccagcaaag

SEQ ID NO: 29814 - RNA, 20 nt, Artificial Sequence
  spacer sequence CTCN PAM
ccagcaaagcuugagugggc

SEQ ID NO: 29815 - RNA, 20 nt, Artificial Sequence
  spacer sequence CTCN PAM
agcuuugcuggggaggcugu

SEQ ID NO: 29816 - RNA, 20 nt, Artificial Sequence
  spacer sequence CTCN PAM
aaaugucucuagucaccccu

SEQ ID NO: 29817 - RNA, 20 nt, Artificial Sequence
  spacer sequence CTCN PAM
agucaccccugggccccauu

SEQ ID NO: 29818 - RNA, 20 nt, Artificial Sequence
  spacer sequence CTCN PAM
cagcuggagcggggcagcca

SEQ ID NO: 29819 - RNA, 20 nt, Artificial Sequence
  spacer sequence CTCN PAM
gcuggagcggggcagccaga

SEQ ID NO: 29820 - RNA, 20 nt, Artificial Sequence
  spacer sequence CTCN PAM
agcugagagaauccagaucu

SEQ ID NO: 29821 - RNA, 20 nt, Artificial Sequence
  spacer sequence CTCN PAM
ggcugccccgcuccagcuga

SEQ ID NO: 29822 - RNA, 20 nt, Artificial Sequence
  spacer sequence CTCN PAM
ucuggcugccccgcuccagc

SEQ ID NO: 29823 - RNA, 20 nt, Artificial Sequence
  spacer sequence CTCN PAM
cuggccccuagcuaccuugg

SEQ ID NO: 29824 - RNA, 20 nt, Artificial Sequence
  spacer sequence CTCN PAM
cagcccccacccccaaggua

SEQ ID NO: 29825 - RNA, 20 nt, Artificial Sequence
  spacer sequence CTCN PAM
ccccacccccgcuggcugga

SEQ ID NO: 29826 - RNA, 20 nt, Artificial Sequence
  spacer sequence CTCN PAM
agccagcgggggugggguga

SEQ ID NO: 29827 - RNA, 20 nt, Artificial Sequence
  spacer sequence CTCN PAM
cacugucugaugaugugucc

SEQ ID NO: 29828 - RNA, 20 nt, Artificial Sequence
  spacer sequence CTCN PAM
gucaugcugacagcaccuuc

SEQ ID NO: 29829 - RNA, 20 nt, Artificial Sequence
  spacer sequence CTCN PAM
cugcacuuguccccuauccu

SEQ ID NO: 29830 - RNA, 20 nt, Artificial Sequence
  spacer sequence CTCN PAM
gcacuuguccccuauccugg

SEQ ID NO: 29831 - RNA, 20 nt, Artificial Sequence
  spacer sequence CTCN PAM
ccugacgacaggaccugcca

SEQ ID NO: 29832 - RNA, 20 nt, Artificial Sequence
  spacer sequence CTCN PAM
gccuuguggacaggguggca

SEQ ID NO: 29833 - RNA, 20 nt, Artificial Sequence
  spacer sequence CTCN PAM
gggcugcccuggcccugcug

SEQ ID NO: 29834 - RNA, 20 nt, Artificial Sequence
  spacer sequence CTCN PAM
gcagggccagggcagcccag

SEQ ID NO: 29835 - RNA, 20 nt, Artificial Sequence
  spacer sequence CTCN PAM
gccagcucagcagggccagg

SEQ ID NO: 29836 - RNA, 20 nt, Artificial Sequence
  spacer sequence CTCN PAM
gcuccccacacaaacuccug

SEQ ID NO: 29837 - RNA, 20 nt, Artificial Sequence
  spacer sequence CTCN PAM
ccacacaaacuccugccucg

SEQ ID NO: 29838 - RNA, 20 nt, Artificial Sequence
  spacer sequence CTCN PAM
ugccucgagcccagauaagg

SEQ ID NO: 29839 - RNA, 20 nt, Artificial Sequence
  spacer sequence CTCN PAM
agcccagauaaggcagcccu

SEQ ID NO: 29840 - RNA, 20 nt, Artificial Sequence
  spacer sequence CTCN PAM
aggcaggaguuugugugggg

SEQ ID NO: 29841 - RNA, 20 nt, Artificial Sequence
  spacer sequence CTCN PAM
aggauccugccugacccaag

SEQ ID NO: 29842 - RNA, 20 nt, Artificial Sequence
  spacer sequence CTCN PAM
gggcuguagcacauagaucc

SEQ ID NO: 29843 - RNA, 20 nt, Artificial Sequence
  spacer sequence CTCN PAM
ggggcagggggugcuuuugc

SEQ ID NO: 29844 - RNA, 20 nt, Artificial Sequence
  spacer sequence CTCN PAM
gacugcuuccucgccucaac

SEQ ID NO: 29845 - RNA, 20 nt, Artificial Sequence
  spacer sequence CTCN PAM
ccucaacagcagcagaguug

SEQ ID NO: 29846 - RNA, 20 nt, Artificial Sequence
  spacer sequence CTCN PAM
acagcagcagaguuguggag

SEQ ID NO: 29847 - RNA, 20 nt, Artificial Sequence
  spacer sequence CTCN PAM
gcugcuguugaggcgaggaa

SEQ ID NO: 29848 - RNA, 20 nt, Artificial Sequence
  spacer sequence CTCN PAM
acaacucugcugcuguugag

SEQ ID NO: 29849 - RNA, 20 nt, Artificial Sequence
  spacer sequence CTCN PAM
cugaccauaaccccacgaac

SEQ ID NO: 29850 - RNA, 20 nt, Artificial Sequence
  spacer sequence CTCN PAM
gaccauaaccccacgaacac

SEQ ID NO: 29851 - RNA, 20 nt, Artificial Sequence
  spacer sequence CTCN PAM
aacacgaaguaaguguugga

SEQ ID NO: 29852 - RNA, 20 nt, Artificial Sequence
  spacer sequence CTCN PAM
gacuuccucuaacacgaagu

SEQ ID NO: 29853 - RNA, 20 nt, Artificial Sequence
  spacer sequence CTCN PAM
gccugucugggcucugacuu

SEQ ID NO: 29854 - RNA, 20 nt, Artificial Sequence
  spacer sequence CTCN PAM
gccaaggucacacagcagcu

SEQ ID NO: 29855 - RNA, 20 nt, Artificial Sequence
  spacer sequence CTCN PAM
cccgcuggcagaccaucagc

SEQ ID NO: 29856 - RNA, 20 nt, Artificial Sequence
  spacer sequence CTCN PAM
cucgcccgcuggcagaccau

SEQ ID NO: 29857 - RNA, 20 nt, Artificial Sequence
  spacer sequence CTCN PAM
cauucccagggaugagagcc

SEQ ID NO: 29858 - RNA, 20 nt, Artificial Sequence
  spacer sequence CTCN PAM
ucccugggaaugugagugga

SEQ ID NO: 29859 - RNA, 20 nt, Artificial Sequence
  spacer sequence CTCN PAM
caucccugggaaugugagug

SEQ ID NO: 29860 - RNA, 20 nt, Artificial Sequence
  spacer sequence CTCN PAM
gcucucaucccugggaaugu

SEQ ID NO: 29861 - RNA, 20 nt, Artificial Sequence
  spacer sequence CTCN PAM
cagccaugcucggcucucau

SEQ ID NO: 29862 - RNA, 20 nt, Artificial Sequence
  spacer sequence CTCN PAM
gcgcuccacagugaccaggu

SEQ ID NO: 29863 - RNA, 20 nt, Artificial Sequence
  spacer sequence CTCN PAM
acagugaccagguggccccc

SEQ ID NO: 29864 - RNA, 20 nt, Artificial Sequence
  spacer sequence CTCN PAM
uuuaccaccucauccuggau

SEQ ID NO: 29865 - RNA, 20 nt, Artificial Sequence
  spacer sequence CTCN PAM
uccuggaugccccaauggcc

SEQ ID NO: 29866 - RNA, 20 nt, Artificial Sequence
  spacer sequence CTCN PAM
ggccauuggggcauccagga

SEQ ID NO: 29867 - RNA, 20 nt, Artificial Sequence
  spacer sequence CTCN PAM
cgggccauuggggcauccag

SEQ ID NO: 29868 - RNA, 20 nt, Artificial Sequence
  spacer sequence CTCN PAM
gggaaccugugcgggaaggc

SEQ ID NO: 29869 - RNA, 20 nt, Artificial Sequence
  spacer sequence CTCN PAM
ggccgcccgcacacucagcc

SEQ ID NO: 29870 - RNA, 20 nt, Artificial Sequence
  spacer sequence CTCN PAM
gcccucccagccaccugcag

SEQ ID NO: 29871 - RNA, 20 nt, Artificial Sequence
  spacer sequence CTCN PAM
cagccaccugcagaaccuca

SEQ ID NO: 29872 - RNA, 20 nt, Artificial Sequence
  spacer sequence CTCN PAM
ggcagcacgcccgcuggcag

SEQ ID NO: 29873 - RNA, 20 nt, Artificial Sequence
  spacer sequence CTCN PAM
gccccagagcaccggcuccc

SEQ ID NO: 29874 - RNA, 20 nt, Artificial Sequence
  spacer sequence CTCN PAM
ggggcugaguccugcccagu

SEQ ID NO: 29875 - RNA, 20 nt, Artificial Sequence
  spacer sequence CTCN PAM
ccacccagcccacaaccucc

SEQ ID NO: 29876 - RNA, 20 nt, Artificial Sequence
  spacer sequence CTCN PAM
ugcuccuggauguccagggc

SEQ ID NO: 29877 - RNA, 20 nt, Artificial Sequence
  spacer sequence CTCN PAM
uggauguccagggcagcccc

SEQ ID NO: 29878 - RNA, 20 nt, Artificial Sequence
  spacer sequence CTCN PAM
ccaccaggugcuacagcuca

SEQ ID NO: 29879 - RNA, 20 nt, Artificial Sequence
  spacer sequence CTCN PAM
accaggugcuacagcucacc

SEQ ID NO: 29880 - RNA, 20 nt, Artificial Sequence
  spacer sequence CTCN PAM
ccucucguguccagacuggc

SEQ ID NO: 29881 - RNA, 20 nt, Artificial Sequence
  spacer sequence CTCN PAM
cguguccagacuggcugccc

SEQ ID NO: 29882 - RNA, 20 nt, Artificial Sequence
  spacer sequence CTCN PAM
uguccagacuggcugcccgc

SEQ ID NO: 29883 - RNA, 20 nt, Artificial Sequence
  spacer sequence CTCN PAM
agcuuccacuucuugaccuu

SEQ ID NO: 29884 - RNA, 20 nt, Artificial Sequence
  spacer sequence CTCN PAM
cccgccugcgccgccaugcc

SEQ ID NO: 29885 - RNA, 20 nt, Artificial Sequence
  spacer sequence CTCN PAM
ccaggcccugcugcagcccc

SEQ ID NO: 29886 - RNA, 20 nt, Artificial Sequence
  spacer sequence CTCN PAM
agccuuggugcuccugguac

SEQ ID NO: 29887 - RNA, 20 nt, Artificial Sequence
  spacer sequence CTCN PAM
ugguaccggcauccaacugg

SEQ ID NO: 29888 - RNA, 20 nt, Artificial Sequence
  spacer sequence CTCN PAM
guucccugccaguuggaugc

SEQ ID NO: 29889 - RNA, 20 nt, Artificial Sequence
  spacer sequence CTCN PAM
ggcuaagacuucuuccuggg

SEQ ID NO: 29890 - RNA, 20 nt, Artificial Sequence
  spacer sequence CTCN PAM
gaccuacggccaccuggggc

SEQ ID NO: 29891 - RNA, 20 nt, Artificial Sequence
  spacer sequence CTCN PAM
cagaccuacggccaccuggg

SEQ ID NO: 29892 - RNA, 20 nt, Artificial Sequence
  spacer sequence CTCN PAM
gucccagugauggggggccc

SEQ ID NO: 29893 - RNA, 20 nt, Artificial Sequence
  spacer sequence CTCN PAM
cugucccagugauggggggc

SEQ ID NO: 29894 - RNA, 20 nt, Artificial Sequence
  spacer sequence CTCN PAM
gagaggggcagaagcgggag

SEQ ID NO: 29895 - RNA, 20 nt, Artificial Sequence
  spacer sequence CTCN PAM
gagcagguaccccucucugu

SEQ ID NO: 29896 - RNA, 20 nt, Artificial Sequence
  spacer sequence CTCN PAM
ccgagcagguaccccucucu

SEQ ID NO: 29897 - RNA, 20 nt, Artificial Sequence
  spacer sequence CTCN PAM
cgcuucugccccucuccgag

SEQ ID NO: 29898 - RNA, 20 nt, Artificial Sequence
  spacer sequence CTCN PAM
ucccgcuucugccccucucc

SEQ ID NO: 29899 - RNA, 20 nt, Artificial Sequence
  spacer sequence CTCN PAM
guggcugggugggcuacacu

SEQ ID NO: 29900 - RNA, 20 nt, Artificial Sequence
  spacer sequence CTCN PAM
gcccucuggggaaggucccu

SEQ ID NO: 29901 - RNA, 20 nt, Artificial Sequence
  spacer sequence CTCN PAM
ggggaaggucccuggauaug

SEQ ID NO: 29902 - RNA, 20 nt, Artificial Sequence
  spacer sequence CTCN PAM
aaaccccauauccagggacc

SEQ ID NO: 29903 - RNA, 20 nt, Artificial Sequence
  spacer sequence CTCN PAM
ccaaaccccauauccaggga

SEQ ID NO: 29904 - RNA, 20 nt, Artificial Sequence
  spacer sequence CTCN PAM
uuuucucuccaaaccccaua

SEQ ID NO: 29905 - RNA, 20 nt, Artificial Sequence
  spacer sequence CTCN PAM
cgcccacggcgugggcugca

SEQ ID NO: 29906 - RNA, 20 nt, Artificial Sequence
  spacer sequence CTCN PAM
cccacggcgugggcugcagg

SEQ ID NO: 29907 - RNA, 20 nt, Artificial Sequence
  spacer sequence CTCN PAM
ccugcagcccacgccguggg

SEQ ID NO: 29908 - RNA, 20 nt, Artificial Sequence
  spacer sequence CTCN PAM
cucaccugcagcccacgccg

SEQ ID NO: 29909 - RNA, 20 nt, Artificial Sequence
  spacer sequence CTCN PAM
ccagaaccuagggaauguca

SEQ ID NO: 29910 - RNA, 20 nt, Artificial Sequence
  spacer sequence CTCN PAM
agaaccuagggaaugucaaa

SEQ ID NO: 29911 - RNA, 20 nt, Artificial Sequence
  spacer sequence CTCN PAM
uuugacauucccuagguucu

SEQ ID NO: 29912 - RNA, 20 nt, Artificial Sequence
  spacer sequence CTCN PAM
caccucauuugacauucccu

SEQ ID NO: 29913 - RNA, 20 nt, Artificial Sequence
  spacer sequence CTCN PAM
cacaugcagggggcacccca

SEQ ID NO: 29914 - RNA, 20 nt, Artificial Sequence
  spacer sequence CTCN PAM
cucuuucucccgugugcaau

SEQ ID NO: 29915 - RNA, 20 nt, Artificial Sequence
  spacer sequence CTCN PAM
uucucccgugugcaaugacc

SEQ ID NO: 29916 - RNA, 20 nt, Artificial Sequence
  spacer sequence CTCN PAM
cgugugcaaugacccggcgg

SEQ ID NO: 29917 - RNA, 20 nt, Artificial Sequence
  spacer sequence CTCN PAM
uuggcccgccgggucauugc

SEQ ID NO: 29918 - RNA, 20 nt, Artificial Sequence
  spacer sequence CTCN PAM
cuguccccaguccaggacca

SEQ ID NO: 29919 - RNA, 20 nt, Artificial Sequence
  spacer sequence CTCN PAM
uuccccucccuguccccagu

SEQ ID NO: 29920 - RNA, 20 nt, Artificial Sequence
  spacer sequence CTCN PAM
ccggcuguggacaccauggg

SEQ ID NO: 29921 - RNA, 20 nt, Artificial Sequence
  spacer sequence CTCN PAM
ccgaggugccuuccccagag

SEQ ID NO: 29922 - RNA, 20 nt, Artificial Sequence
  spacer sequence CTCN PAM
gugagggccccugcgugucc

SEQ ID NO: 29923 - RNA, 20 nt, Artificial Sequence
  spacer sequence CTCN PAM
ggggaaggcaccucggugag

SEQ ID NO: 29924 - RNA, 20 nt, Artificial Sequence
  spacer sequence CTCN PAM
gcaucuagcgacucugggga

SEQ ID NO: 29925 - RNA, 20 nt, Artificial Sequence
  spacer sequence CTCN PAM
ccaguucagaaugcagccca

SEQ ID NO: 29926 - RNA, 20 nt, Artificial Sequence
  spacer sequence CTCN PAM
uccccaguucagaaugcagc

SEQ ID NO: 29927 - RNA, 20 nt, Artificial Sequence
  spacer sequence CTCN PAM
ccacagggcccuccucccca

SEQ ID NO: 29928 - RNA, 20 nt, Artificial Sequence
  spacer sequence CTCN PAM
agcuagaccuacuucuccug

SEQ ID NO: 29929 - RNA, 20 nt, Artificial Sequence
  spacer sequence CTCN PAM
ugcaggagccacugcagaca

SEQ ID NO: 29930 - RNA, 20 nt, Artificial Sequence
  spacer sequence CTCN PAM
ugcaggagaaguaggucuag

SEQ ID NO: 29931 - RNA, 20 nt, Artificial Sequence
  spacer sequence CTCN PAM
ugcagggaagacccagcuug

SEQ ID NO: 29932 - RNA, 20 nt, Artificial Sequence
  spacer sequence CTCN PAM
ugcuccugcagggaagaccc

SEQ ID NO: 29933 - RNA, 20 nt, Artificial Sequence
  spacer sequence CTCN PAM
uggagagguagcagagccgg

SEQ ID NO: 29934 - RNA, 20 nt, Artificial Sequence
  spacer sequence CTCN PAM
augagucacugcccccugug

SEQ ID NO: 29935 - RNA, 20 nt, Artificial Sequence
  spacer sequence CTCN PAM
ccaugagucacugcccccug

SEQ ID NO: 29936 - RNA, 20 nt, Artificial Sequence
  spacer sequence CTCN PAM
gcuaccucuccaugagucac

SEQ ID NO: 29937 - RNA, 20 nt, Artificial Sequence
  spacer sequence CTCN PAM
ggcucugcuaccucuccaug

SEQ ID NO: 29938 - RNA, 20 nt, Artificial Sequence
  spacer sequence CTCN PAM
acccggcuuggcucugccca

SEQ ID NO: 29939 - RNA, 20 nt, Artificial Sequence
  spacer sequence CTCN PAM
gcccagcgggccccgggggc

SEQ ID NO: 29940 - RNA, 20 nt, Artificial Sequence
  spacer sequence CTCN PAM
cucuggaccuccaucuccca

SEQ ID NO: 29941 - RNA, 20 nt, Artificial Sequence
  spacer sequence CTCN PAM
cuggaccuccaucucccauc

SEQ ID NO: 29942 - RNA, 20 nt, Artificial Sequence
  spacer sequence CTCN PAM
ggaccuccaucucccauccc

SEQ ID NO: 29943 - RNA, 20 nt, Artificial Sequence
  spacer sequence CTCN PAM
aucucccauccccauggcgg

SEQ ID NO: 29944 - RNA, 20 nt, Artificial Sequence
  spacer sequence CTCN PAM
cauccccauggcgggggagg

SEQ ID NO: 29945 - RNA, 20 nt, Artificial Sequence
  spacer sequence CTCN PAM
cccgccauggggaugggaga

SEQ ID NO: 29946 - RNA, 20 nt, Artificial Sequence
  spacer sequence CTCN PAM
ucccccgccauggggauggg

SEQ ID NO: 29947 - RNA, 20 nt, Artificial Sequence
  spacer sequence CTCN PAM
gagggugcgccuguacccau

SEQ ID NO: 29948 - RNA, 20 nt, Artificial Sequence
  spacer sequence CTCN PAM
gagggccaggccuccucccc

SEQ ID NO: 29949 - RNA, 20 nt, Artificial Sequence
  spacer sequence CTCN PAM
agggccuggcgcuaccuugc

SEQ ID NO: 29950 - RNA, 20 nt, Artificial Sequence
  spacer sequence CTCN PAM
gcgcugggcagggcaagcac

SEQ ID NO: 29951 - RNA, 20 nt, Artificial Sequence
  spacer sequence CTCN PAM
gaggaauggggacgccaagg

SEQ ID NO: 29952 - RNA, 20 nt, Artificial Sequence
  spacer sequence CTCN PAM
gagugcuugcccugcccagc

SEQ ID NO: 29953 - RNA, 20 nt, Artificial Sequence
  spacer sequence CTCN PAM
agaaggacuccagacgcccu

SEQ ID NO: 29954 - RNA, 20 nt, Artificial Sequence
  spacer sequence CTCN PAM
agccggcugcaccgccuugg

SEQ ID NO: 29955 - RNA, 20 nt, Artificial Sequence
  spacer sequence CTCN PAM
agacgcccuguccgccccau

SEQ ID NO: 29956 - RNA, 20 nt, Artificial Sequence
  spacer sequence CTCN PAM
acccaaccauggccgggugg

SEQ ID NO: 29957 - RNA, 20 nt, Artificial Sequence
  spacer sequence CTCN PAM
cucuacccaaccauggccgg

SEQ ID NO: 29958 - RNA, 20 nt, Artificial Sequence
  spacer sequence CTCN PAM
cgcugccugcgcgccaggga

SEQ ID NO: 29959 - RNA, 20 nt, Artificial Sequence
  spacer sequence CTCN PAM
cuggcgcgcaggcagcggga

SEQ ID NO: 29960 - RNA, 20 nt, Artificial Sequence
  spacer sequence CTCN PAM
cgggucacgacuccgggagg

SEQ ID NO: 29961 - RNA, 20 nt, Artificial Sequence
  spacer sequence CTCN PAM
gggagguggaggucuccccg

SEQ ID NO: 29962 - RNA, 20 nt, Artificial Sequence
  spacer sequence CTCN PAM
cggagucgugacccgggagc

SEQ ID NO: 29963 - RNA, 20 nt, Artificial Sequence
  spacer sequence CTCN PAM
accucccggagucgugaccc

SEQ ID NO: 29964 - RNA, 20 nt, Artificial Sequence
  spacer sequence CTCN PAM
ccggugcugagugcuggugg

SEQ ID NO: 29965 - RNA, 20 nt, Artificial Sequence
  spacer sequence CTCN PAM
gcaccggggagaccuccacc

SEQ ID NO: 29966 - RNA, 20 nt, Artificial Sequence
  spacer sequence CTCN PAM
caccagcacucagcaccggg

SEQ ID NO: 29967 - RNA, 20 nt, Artificial Sequence
  spacer sequence CTCN PAM
ggggcugggaacagaugcgc

SEQ ID NO: 29968 - RNA, 20 nt, Artificial Sequence
  spacer sequence CTCN PAM
gcagucgccaugggaaccag

SEQ ID NO: 29969 - RNA, 20 nt, Artificial Sequence
  spacer sequence CTCN PAM
cuggcaacccgcccccccag

SEQ ID NO: 29970 - RNA, 20 nt, Artificial Sequence
  spacer sequence CTCN PAM
ccgccgcucccuggcaaccc

SEQ ID NO: 29971 - RNA, 20 nt, Artificial Sequence
  spacer sequence CTCN PAM
ggggggcgggcgcgaagccg

SEQ ID NO: 29972 - RNA, 20 nt, Artificial Sequence
  spacer sequence CTCN PAM
ccgccgugcccagcccgggc

SEQ ID NO: 29973 - RNA, 20 nt, Artificial Sequence
  spacer sequence CTCN PAM
gggcgcccgggcugggcacg

SEQ ID NO: 29974 - RNA, 20 nt, Artificial Sequence
  spacer sequence CTCN PAM
ggggaaacugaggcggggcg

SEQ ID NO: 29975 - RNA, 20 nt, Artificial Sequence
  spacer sequence CTCN PAM
guuucccccgagcguaaggc

SEQ ID NO: 29976 - RNA, 20 nt, Artificial Sequence
  spacer sequence CTCN PAM
uuucccuggugccgcgcccc

SEQ ID NO: 29977 - RNA, 20 nt, Artificial Sequence
  spacer sequence CTCN PAM
ccacccggcugcgccgcaca

SEQ ID NO: 29978 - RNA, 20 nt, Artificial Sequence
  spacer sequence CTCN PAM
gcggccccaggucagcaccg

SEQ ID NO: 29979 - RNA, 20 nt, Artificial Sequence
  spacer sequence CTCN PAM
cgcgugcggugcugaccugg

SEQ ID NO: 29980 - RNA, 20 nt, Artificial Sequence
  spacer sequence CTCN PAM
gggaaaggucucgcgcgugc

SEQ ID NO: 29981 - RNA, 20 nt, Artificial Sequence
  spacer sequence CTCN PAM
cuccgggaaaggucucgcgc

SEQ ID NO: 29982 - RNA, 20 nt, Artificial Sequence
  spacer sequence CTCN PAM
cgcuccgggaaaggucucgc

SEQ ID NO: 29983 - RNA, 20 nt, Artificial Sequence
  spacer sequence CTCN PAM
ucucgcuccgggaaaggucu

SEQ ID NO: 29984 - RNA, 20 nt, Artificial Sequence
  spacer sequence CTCN PAM
ugcccuucccggacuuccgc

SEQ ID NO: 29985 - RNA, 20 nt, Artificial Sequence
  spacer sequence CTCN PAM
guuucccgcugucgcgugug

SEQ ID NO: 29986 - RNA, 20 nt, Artificial Sequence
  spacer sequence CTCN PAM
gcgcucccggucacaggcug

SEQ ID NO: 29987 - RNA, 20 nt, Artificial Sequence
  spacer sequence CTCN PAM
cggucacaggcugcccgggc

SEQ ID NO: 29988 - RNA, 20 nt, Artificial Sequence
  spacer sequence CTCN PAM
uuucccgaccuacauaugcg

SEQ ID NO: 29989 - RNA, 20 nt, Artificial Sequence
  spacer sequence CTCN PAM
agccugaacucauuucccga

SEQ ID NO: 29990 - RNA, 20 nt, Artificial Sequence
  spacer sequence CTCN PAM
ggucaccauccugcgccugu

SEQ ID NO: 29991 - RNA, 20 nt, Artificial Sequence
  spacer sequence CTCN PAM
ugccaucuuccccggccucc

SEQ ID NO: 29992 - RNA, 20 nt, Artificial Sequence
  spacer sequence CTCN PAM
gccuccugccaucuuccccg

SEQ ID NO: 29993 - RNA, 20 nt, Artificial Sequence
  spacer sequence CTCN PAM
uccccucggccuccugccau

SEQ ID NO: 29994 - RNA, 20 nt, Artificial Sequence
  spacer sequence CTCN PAM
ugggggaggcggcugcggga

SEQ ID NO: 29995 - RNA, 20 nt, Artificial Sequence
  spacer sequence CTCN PAM
cccaggagccccccucuucc

SEQ ID NO: 29996 - RNA, 20 nt, Artificial Sequence
  spacer sequence CTCN PAM
cgcagccgccucccccagga

SEQ ID NO: 29997 - RNA, 20 nt, Artificial Sequence
  spacer sequence CTCN PAM
gcucccgcagccgccucccc

SEQ ID NO: 29998 - RNA, 20 nt, Artificial Sequence
  spacer sequence CTCN PAM
gcccucggcucccgcagccg

SEQ ID NO: 29999 - RNA, 20 nt, Artificial Sequence
  spacer sequence CTCN PAM
ggggcgcggugcugccccgu

SEQ ID NO: 30000 - RNA, 20 nt, Artificial Sequence
  spacer sequence CTCN PAM
ccauccccacccuuggccgg

SEQ ID NO: 30001 - RNA, 20 nt, Artificial Sequence
  spacer sequence CTCN PAM
ccuggcucgccauccccacc

SEQ ID NO: 30002 - RNA, 20 nt, Artificial Sequence
  spacer sequence CTCN PAM
gcccuggcgucgggucccug

SEQ ID NO: 30003 - RNA, 20 nt, Artificial Sequence
  spacer sequence CTCN PAM
gcucagcccuggcgucgggu

SEQ ID NO: 30004 - RNA, 20 nt, Artificial Sequence
  spacer sequence CTCN PAM
cccgaccucacagggagaaa

SEQ ID NO: 30005 - RNA, 20 nt, Artificial Sequence
  spacer sequence CTCN PAM
cagggagaaacugaggcugg

SEQ ID NO: 30006 - RNA, 20 nt, Artificial Sequence
  spacer sequence CTCN PAM
cugugaggucgggcgaggac

SEQ ID NO: 30007 - RNA, 20 nt, Artificial Sequence
  spacer sequence CTCN PAM
guuucucccugugaggucgg

SEQ ID NO: 30008 - RNA, 20 nt, Artificial Sequence
  spacer sequence CTCN PAM
ggccccgccccagccucagu

SEQ ID NO: 30009 - RNA, 20 nt, Artificial Sequence
  spacer sequence CTCN PAM
ggaggcagccgggugggggg

SEQ ID NO: 30010 - RNA, 20 nt, Artificial Sequence
  spacer sequence CTCN PAM
agagggacccccgcucaggc

SEQ ID NO: 30011 - RNA, 20 nt, Artificial Sequence
  spacer sequence CTCN PAM
guccccacgcccgccggacu

SEQ ID NO: 30012 - RNA, 20 nt, Artificial Sequence
  spacer sequence CTCN PAM
uccgcgcccucccuccggcc

SEQ ID NO: 30013 - RNA, 20 nt, Artificial Sequence
  spacer sequence CTCN PAM
gcgcccucccuccggccgcu

SEQ ID NO: 30014 - RNA, 20 nt, Artificial Sequence
  spacer sequence CTCN PAM
cuccggccgcuuagcccaca

SEQ ID NO: 30015 - RNA, 20 nt, Artificial Sequence
  spacer sequence CTCN PAM
ggccgcuuagcccacagccg

SEQ ID NO: 30016 - RNA, 20 nt, Artificial Sequence
  spacer sequence CTCN PAM
gggcugcggggggcggacgg

SEQ ID NO: 30017 - RNA, 20 nt, Artificial Sequence
  spacer sequence CTCN PAM
gcgccgggacgagcggccca

SEQ ID NO: 30018 - RNA, 20 nt, Artificial Sequence
  spacer sequence CTCN PAM
ucccggcgcugagguaggcg

SEQ ID NO: 30019 - RNA, 20 nt, Artificial Sequence
  spacer sequence CTCN PAM
cggcuggcuccggcgcccgg

SEQ ID NO: 30020 - RNA, 20 nt, Artificial Sequence
  spacer sequence CTCN PAM
ggcgcccgguggccgcggag

SEQ ID NO: 30021 - RNA, 20 nt, Artificial Sequence
  spacer sequence CTCN PAM
gcggccaccgggcgccggag

SEQ ID NO: 30022 - RNA, 20 nt, Artificial Sequence
  spacer sequence CTCN PAM
gccugcuccgcggccaccgg

SEQ ID NO: 30023 - RNA, 20 nt, Artificial Sequence
  spacer sequence CTCN PAM
auucauaaauucuccgccug

SEQ ID NO: 30024 - RNA, 20 nt, Artificial Sequence
  spacer sequence CTCN PAM
ccauucauaaauucuccgcc

SEQ ID NO: 30025 - RNA, 20 nt, Artificial Sequence
  spacer sequence CTCN PAM
cccgcgccgcgcucuccauu

SEQ ID NO: 30026 - RNA, 20 nt, Artificial Sequence
  spacer sequence CTCN PAM
cgccggccucccccgcgccg

SEQ ID NO: 30027 - RNA, 20 nt, Artificial Sequence
  spacer sequence CTCN PAM
cgcgccggccucccccgcgc

SEQ ID NO: 30028 - RNA, 20 nt, Artificial Sequence
  spacer sequence CTCN PAM
ucucgcgccggccucccccg

SEQ ID NO: 30029 - RNA, 20 nt, Artificial Sequence
  spacer sequence CTCN PAM
gcgcgcccggugcugcccgg

SEQ ID NO: 30030 - RNA, 20 nt, Artificial Sequence
  spacer sequence CTCN PAM
ccgcugggucuggcuggcuc

SEQ ID NO: 30031 - RNA, 20 nt, Artificial Sequence
  spacer sequence CTCN PAM
gcgccggccaccgccucccc

SEQ ID NO: 30032 - RNA, 20 nt, Artificial Sequence
  spacer sequence CTCN PAM
ccuucccuuccggcggggcg

SEQ ID NO: 30033 - RNA, 20 nt, Artificial Sequence
  spacer sequence CTCN PAM
gccccccgccccgccggaag

SEQ ID NO: 30034 - RNA, 20 nt, Artificial Sequence
  spacer sequence CTCN PAM
cgggcgcccacuccgcacgc

SEQ ID NO: 30035 - RNA, 20 nt, Artificial Sequence
  spacer sequence CTCN PAM
gcacgcggagccgccccccg

SEQ ID NO: 30036 - RNA, 20 nt, Artificial Sequence
  spacer sequence CTCN PAM
gcgugcggagugggcgcccg

SEQ ID NO: 30037 - RNA, 20 nt, Artificial Sequence
  spacer sequence CTCN PAM
gccgccgcggcgggugcggg

SEQ ID NO: 30038 - RNA, 20 nt, Artificial Sequence
  spacer sequence CTCN PAM
cccgguccugaggucccagg

SEQ ID NO: 30039 - RNA, 20 nt, Artificial Sequence
  spacer sequence CTCN PAM
ggaccgggcgaggugaaucg

SEQ ID NO: 30040 - RNA, 20 nt, Artificial Sequence
  spacer sequence CTCN PAM
gcagcccgaggugcgccgcg

SEQ ID NO: 30041 - RNA, 20 nt, Artificial Sequence
  spacer sequence CTCN PAM
ggcugcagagucgugaauuc

SEQ ID NO: 30042 - RNA, 20 nt, Artificial Sequence
  spacer sequence CTCN PAM
ugcgcacgcggcgcaccucg

SEQ ID NO: 30043 - RNA, 20 nt, Artificial Sequence
  spacer sequence CTCN PAM
ccucucacguugcuuggucc

SEQ ID NO: 30044 - RNA, 20 nt, Artificial Sequence
  spacer sequence CTCN PAM
cacguugcuugguccguggg

SEQ ID NO: 30045 - RNA, 20 nt, Artificial Sequence
  spacer sequence CTCN PAM
cguugcuugguccguggggg

SEQ ID NO: 30046 - RNA, 20 nt, Artificial Sequence
  spacer sequence CTCN PAM
gccacaauuccccuuuaagc

SEQ ID NO: 30047 - RNA, 20 nt, Artificial Sequence
  spacer sequence CTCN PAM
ggacacaggcgccccgccug

SEQ ID NO: 30048 - RNA, 20 nt, Artificial Sequence
  spacer sequence CTCN PAM
ggcacuguggaggacucgcc

SEQ ID NO: 30049 - RNA, 20 nt, Artificial Sequence
  spacer sequence CTCN PAM
acagugccagaggggaccug

SEQ ID NO: 30050 - RNA, 20 nt, Artificial Sequence
  spacer sequence CTCN PAM
ccaugccucuccugcccccu

SEQ ID NO: 30051 - RNA, 20 nt, Artificial Sequence
  spacer sequence CTCN PAM
ccugcccccuccccugugug

SEQ ID NO: 30052 - RNA, 20 nt, Artificial Sequence
  spacer sequence CTCN PAM
ugcccccuccccugugugac

SEQ ID NO: 30053 - RNA, 20 nt, Artificial Sequence
  spacer sequence CTCN PAM
ccugugugacagcgaucaca

SEQ ID NO: 30054 - RNA, 20 nt, Artificial Sequence
  spacer sequence CTCN PAM
gcuuugugccggggucugug

SEQ ID NO: 30055 - RNA, 20 nt, Artificial Sequence
  spacer sequence CTCN PAM
gcucagcuuugugccggggu

SEQ ID NO: 30056 - RNA, 20 nt, Artificial Sequence
  spacer sequence CTCN PAM
cagaggccugcuccucgugg

SEQ ID NO: 30057 - RNA, 20 nt, Artificial Sequence
  spacer sequence CTCN PAM
gugagugcacguuugggccc

SEQ ID NO: 30058 - RNA, 20 nt, Artificial Sequence
  spacer sequence CTCN PAM
ucguggggugacaucagaac

SEQ ID NO: 30059 - RNA, 20 nt, Artificial Sequence
  spacer sequence CTCN PAM
uggggugacaucagaacgac

SEQ ID NO: 30060 - RNA, 20 nt, Artificial Sequence
  spacer sequence CTCN PAM
cucuuagaccaucgaaccuc

SEQ ID NO: 30061 - RNA, 20 nt, Artificial Sequence
  spacer sequence CTCN PAM
uagaccaucgaaccucaucc

SEQ ID NO: 30062 - RNA, 20 nt, Artificial Sequence
  spacer sequence CTCN PAM
uccugcagauacucaggcca

SEQ ID NO: 30063 - RNA, 20 nt, Artificial Sequence
  spacer sequence CTCN PAM
ggccacacaccugccaccag

SEQ ID NO: 30064 - RNA, 20 nt, Artificial Sequence
  spacer sequence CTCN PAM
ggccaggcugguggcaggug

SEQ ID NO: 30065 - RNA, 20 nt, Artificial Sequence
  spacer sequence CTCN PAM
gagcccacgccuaacacccc

SEQ ID NO: 30066 - RNA, 20 nt, Artificial Sequence
  spacer sequence CTCN PAM
gagggguugggguggcgcuc

SEQ ID NO: 30067 - RNA, 20 nt, Artificial Sequence
  spacer sequence CTCN PAM
ucuuucucgucccaaagaaa

SEQ ID NO: 30068 - RNA, 20 nt, Artificial Sequence
  spacer sequence CTCN PAM
uucucgucccaaagaaaggc

SEQ ID NO: 30069 - RNA, 20 nt, Artificial Sequence
  spacer sequence CTCN PAM
ucccaaagaaaggcugacac

SEQ ID NO: 30070 - RNA, 20 nt, Artificial Sequence
  spacer sequence CTCN PAM
ggcacguggcuggcccagcu

SEQ ID NO: 30071 - RNA, 20 nt, Artificial Sequence
  spacer sequence CTCN PAM
gccuccccgccucugcccuu

SEQ ID NO: 30072 - RNA, 20 nt, Artificial Sequence
  spacer sequence CTCN PAM
ccgccucugcccuugcaggu

SEQ ID NO: 30073 - RNA, 20 nt, Artificial Sequence
  spacer sequence CTCN PAM
gcccuugcaggugcccugua

SEQ ID NO: 30074 - RNA, 20 nt, Artificial Sequence
  spacer sequence CTCN PAM
guccaugcagccagagauuc

SEQ ID NO: 30075 - RNA, 20 nt, Artificial Sequence
  spacer sequence CTCN PAM
ggcugcauggacagaggccu

SEQ ID NO: 30076 - RNA, 20 nt, Artificial Sequence
  spacer sequence CTCN PAM
uuccccagcuucacagucuc

SEQ ID NO: 30077 - RNA, 20 nt, Artificial Sequence
  spacer sequence CTCN PAM
gcgcuucugcucuuggcuuc

SEQ ID NO: 30078 - RNA, 20 nt, Artificial Sequence
  spacer sequence CTCN PAM
uggcuuccagcccaugccug

SEQ ID NO: 30079 - RNA, 20 nt, Artificial Sequence
  spacer sequence CTCN PAM
ucugcuacgucccuccaagg

SEQ ID NO: 30080 - RNA, 20 nt, Artificial Sequence
  spacer sequence CTCN PAM
gcuacgucccuccaaggccc

SEQ ID NO: 30081 - RNA, 20 nt, Artificial Sequence
  spacer sequence CTCN PAM
aaggcccuaugccuugcgcc

SEQ ID NO: 30082 - RNA, 20 nt, Artificial Sequence
  spacer sequence CTCN PAM
gauagcugugaacuccaagg

SEQ ID NO: 30083 - RNA, 20 nt, Artificial Sequence
  spacer sequence CTCN PAM
aagggcagccccagggaacc

SEQ ID NO: 30084 - RNA, 20 nt, Artificial Sequence
  spacer sequence CTCN PAM
aaaccuuugcccaugcaauu

SEQ ID NO: 30085 - RNA, 20 nt, Artificial Sequence
  spacer sequence CTCN PAM
gcuuccuucacaggcauuga

SEQ ID NO: 30086 - RNA, 20 nt, Artificial Sequence
  spacer sequence CTCN PAM
aaaaagcaaaaccgaaauac

SEQ ID NO: 30087 - RNA, 20 nt, Artificial Sequence
  spacer sequence CTCN PAM
ccaaaaagcaaaaccgaaau

SEQ ID NO: 30088 - RNA, 20 nt, Artificial Sequence
  spacer sequence CTCN PAM
gucucuccaaaaagcaaaac

SEQ ID NO: 30089 - RNA, 20 nt, Artificial Sequence
  spacer sequence CTCN PAM
cacugucgcccaggcuggag

SEQ ID NO: 30090 - RNA, 20 nt, Artificial Sequence
  spacer sequence CTCN PAM
agccugggcgacagugcgag

SEQ ID NO: 30091 - RNA, 20 nt, Artificial Sequence
  spacer sequence CTCN PAM
cugcaaccuccaccucccgg

SEQ ID NO: 30092 - RNA, 20 nt, Artificial Sequence
  spacer sequence CTCN PAM
accucccggauucaagcaau

SEQ ID NO: 30093 - RNA, 20 nt, Artificial Sequence
  spacer sequence CTCN PAM
cggauucaagcaauuuucca

SEQ ID NO: 30094 - RNA, 20 nt, Artificial Sequence
  spacer sequence CTCN PAM
gcccggaagguaguugggac

SEQ ID NO: 30095 - RNA, 20 nt, Artificial Sequence
  spacer sequence CTCN PAM
acaaaaaaaaacaaaacaaa

SEQ ID NO: 30096 - RNA, 20 nt, Artificial Sequence
  spacer sequence CTCN PAM
aacuucugggcucaagagau

SEQ ID NO: 30097 - RNA, 20 nt, Artificial Sequence
  spacer sequence CTCN PAM
agagauccuucugucucagu

SEQ ID NO: 30098 - RNA, 20 nt, Artificial Sequence
  spacer sequence CTCN PAM
ugagcccagaaguucgagac

SEQ ID NO: 30099 - RNA, 20 nt, Artificial Sequence
  spacer sequence CTCN PAM
gucuccuaaauuguugggac

SEQ ID NO: 30100 - RNA, 20 nt, Artificial Sequence
  spacer sequence CTCN PAM
uaaauuguugggacuacagg

SEQ ID NO: 30101 - RNA, 20 nt, Artificial Sequence
  spacer sequence CTCN PAM
caccuguagucccaacaauu

SEQ ID NO: 30102 - RNA, 20 nt, Artificial Sequence
  spacer sequence CTCN PAM
cucuggcugugugaagaaaa

SEQ ID NO: 30103 - RNA, 20 nt, Artificial Sequence
  spacer sequence CTCN PAM
ggcugugugaagaaaaggua

SEQ ID NO: 30104 - RNA, 20 nt, Artificial Sequence
  spacer sequence CTCN PAM
ccccguuuaguacagguacc

SEQ ID NO: 30105 - RNA, 20 nt, Artificial Sequence
  spacer sequence CTCN PAM
uaggcaagagaugguagccg

SEQ ID NO: 30106 - RNA, 20 nt, Artificial Sequence
  spacer sequence CTCN PAM
ugccuaggaggccccagccu

SEQ ID NO: 30107 - RNA, 20 nt, Artificial Sequence
  spacer sequence CTCN PAM
ggaauuccgcccugucccgg

SEQ ID NO: 30108 - RNA, 20 nt, Artificial Sequence
  spacer sequence CTCN PAM
agccccaaaccugggguucc

SEQ ID NO: 30109 - RNA, 20 nt, Artificial Sequence
  spacer sequence CTCN PAM
cccgugggcgacccuggagu

SEQ ID NO: 30110 - RNA, 20 nt, Artificial Sequence
  spacer sequence CTCN PAM
agggucgcccacgggugagg

SEQ ID NO: 30111 - RNA, 20 nt, Artificial Sequence
  spacer sequence CTCN PAM
aguccccacuccagggucgc

SEQ ID NO: 30112 - RNA, 20 nt, Artificial Sequence
  spacer sequence CTCN PAM
uggaaccacuucccuccagu

SEQ ID NO: 30113 - RNA, 20 nt, Artificial Sequence
  spacer sequence CTCN PAM
cucguggaaccacuucccuc

SEQ ID NO: 30114 - RNA, 20 nt, Artificial Sequence
  spacer sequence CTCN PAM
gucucacucguggaaccacu

SEQ ID NO: 30115 - RNA, 20 nt, Artificial Sequence
  spacer sequence CTCN PAM
caguuuccuggaguggcagc

SEQ ID NO: 30116 - RNA, 20 nt, Artificial Sequence
  spacer sequence CTCN PAM
aggaaacugggaggccuaau

SEQ ID NO: 30117 - RNA, 20 nt, Artificial Sequence
  spacer sequence CTCN PAM
ggaccgcauauccagcugcc

SEQ ID NO: 30118 - RNA, 20 nt, Artificial Sequence
  spacer sequence CTCN PAM
caggaccgcauauccagcug

SEQ ID NO: 30119 - RNA, 20 nt, Artificial Sequence
  spacer sequence CTCN PAM
uggcucucaggaccgcauau

SEQ ID NO: 30120 - RNA, 20 nt, Artificial Sequence
  spacer sequence CTCN PAM
aaaagugaacaggccuccuc

SEQ ID NO: 30121 - RNA, 20 nt, Artificial Sequence
  spacer sequence CTCN PAM
uccucugcaccccccgagcc

SEQ ID NO: 30122 - RNA, 20 nt, Artificial Sequence
  spacer sequence CTCN PAM
ucugcaccccccgagccagg

SEQ ID NO: 30123 - RNA, 20 nt, Artificial Sequence
  spacer sequence CTCN PAM
gcaccccccgagccagggcc

SEQ ID NO: 30124 - RNA, 20 nt, Artificial Sequence
  spacer sequence CTCN PAM
gggggugcagaggaggaggc

SEQ ID NO: 30125 - RNA, 20 nt, Artificial Sequence
  spacer sequence CTCN PAM
aagugaccgucacagcgcug

SEQ ID NO: 30126 - RNA, 20 nt, Artificial Sequence
  spacer sequence CTCN PAM
caccgggccagcgcugugac

SEQ ID NO: 30127 - RNA, 20 nt, Artificial Sequence
  spacer sequence CTCN PAM
ucccaccgggccagcgcugu

SEQ ID NO: 30128 - RNA, 20 nt, Artificial Sequence
  spacer sequence CTCN PAM
ggaugaaggcgugggccugg

SEQ ID NO: 30129 - RNA, 20 nt, Artificial Sequence
  spacer sequence CTCN PAM
cccccugcccguguucaggc

SEQ ID NO: 30130 - RNA, 20 nt, Artificial Sequence
  spacer sequence CTCN PAM
ggauguagggagccacggau

SEQ ID NO: 30131 - RNA, 20 nt, Artificial Sequence
  spacer sequence CTCN PAM
cuacauccggaggcugcacc

SEQ ID NO: 30132 - RNA, 20 nt, Artificial Sequence
  spacer sequence CTCN PAM
ugcugugggcgaauccgaca

SEQ ID NO: 30133 - RNA, 20 nt, Artificial Sequence
  spacer sequence CTCN PAM
cuggcugcacccuuguaaag

SEQ ID NO: 30134 - RNA, 20 nt, Artificial Sequence
  spacer sequence CTCN PAM
ccugcucccugcaccccugg

SEQ ID NO: 30135 - RNA, 20 nt, Artificial Sequence
  spacer sequence CTCN PAM
cugcaccccugggguccagc

SEQ ID NO: 30136 - RNA, 20 nt, Artificial Sequence
  spacer sequence CTCN PAM
aggcccuuuccagggagccc

SEQ ID NO: 30137 - RNA, 20 nt, Artificial Sequence
  spacer sequence CTCN PAM
cuggaaagggccuugagccu

SEQ ID NO: 30138 - RNA, 20 nt, Artificial Sequence
  spacer sequence CTCN PAM
ggcucccuggaaagggccuu

SEQ ID NO: 30139 - RNA, 20 nt, Artificial Sequence
  spacer sequence CTCN PAM
gggaaaaugcggaaucgggg

SEQ ID NO: 30140 - RNA, 20 nt, Artificial Sequence
  spacer sequence CTCN PAM
uuaggcuccgggaaaaugcg

SEQ ID NO: 30141 - RNA, 20 nt, Artificial Sequence
  spacer sequence CTCN PAM
cgcaggucugcggcacccgg

SEQ ID NO: 30142 - RNA, 20 nt, Artificial Sequence
  spacer sequence CTCN PAM
cggcuaugacgucaccgccc

SEQ ID NO: 30143 - RNA, 20 nt, Artificial Sequence
  spacer sequence CTCN PAM
cucgcggcuaugacgucacc

SEQ ID NO: 30144 - RNA, 20 nt, Artificial Sequence
  spacer sequence CTCN PAM
gcugccgucagccagcggcc

SEQ ID NO: 30145 - RNA, 20 nt, Artificial Sequence
  spacer sequence CTCN PAM
gggcuccgcugccgucagcc

SEQ ID NO: 30146 - RNA, 20 nt, Artificial Sequence
  spacer sequence CTCN PAM
ugcgucagaggcgcacgggg

SEQ ID NO: 30147 - RNA, 20 nt, Artificial Sequence
  spacer sequence CTCN PAM
gacgcaggagcgcgugcgcg

SEQ ID NO: 30148 - RNA, 20 nt, Artificial Sequence
  spacer sequence CTCN PAM
ugccuggccgucgcccccgu

SEQ ID NO: 30149 - RNA, 20 nt, Artificial Sequence
  spacer sequence CTCN PAM
ccgaccccccaccuccugcc

SEQ ID NO: 30150 - RNA, 20 nt, Artificial Sequence
  spacer sequence CTCN PAM
gggcgcggagcgcccucugc

SEQ ID NO: 30151 - RNA, 20 nt, Artificial Sequence
  spacer sequence CTCN PAM
gcgcccggagaugcgcucgc

SEQ ID NO: 30152 - RNA, 20 nt, Artificial Sequence
  spacer sequence CTCN PAM
gccggcgucgaggagcagcg

SEQ ID NO: 30153 - RNA, 20 nt, Artificial Sequence
  spacer sequence CTCN PAM
acgccggcagagggcgcucc

SEQ ID NO: 30154 - RNA, 20 nt, Artificial Sequence
  spacer sequence CTCN PAM
ucgacgccggcagagggcgc

SEQ ID NO: 30155 - RNA, 20 nt, Artificial Sequence
  spacer sequence CTCN PAM
cuggggaucccggaccccgg

SEQ ID NO: 30156 - RNA, 20 nt, Artificial Sequence
  spacer sequence CTCN PAM
cgcgucgcccgcgcugugcc

SEQ ID NO: 30157 - RNA, 20 nt, Artificial Sequence
  spacer sequence CTCN PAM
ccgcggucgccguuuccuag

SEQ ID NO: 30158 - RNA, 20 nt, Artificial Sequence
  spacer sequence CTCN PAM
gcuuuuacugugauuuauuu

SEQ ID NO: 30159 - RNA, 20 nt, Artificial Sequence
  spacer sequence CTCN PAM
aacaaaaaaauaaauaaaau

SEQ ID NO: 30160 - RNA, 20 nt, Artificial Sequence
  spacer sequence CTCN PAM
gucucaaacaaaaaaauaaa

SEQ ID NO: 30161 - RNA, 20 nt, Artificial Sequence
  spacer sequence CTCN PAM
gucgcccaggcuggagugca

SEQ ID NO: 30162 - RNA, 20 nt, Artificial Sequence
  spacer sequence CTCN PAM
agccugggcgacugagcaag

SEQ ID NO: 30163 - RNA, 20 nt, Artificial Sequence
  spacer sequence CTCN PAM
gcucacugcaaccucccccc

SEQ ID NO: 30164 - RNA, 20 nt, Artificial Sequence
  spacer sequence CTCN PAM
cugcaaccuccccccccccc

SEQ ID NO: 30165 - RNA, 20 nt, Artificial Sequence
  spacer sequence CTCN PAM
cccccccccccccgcccggg

SEQ ID NO: 30166 - RNA, 20 nt, Artificial Sequence
  spacer sequence CTCN PAM
aacccgggcggggggggggg

SEQ ID NO: 30167 - RNA, 20 nt, Artificial Sequence
  spacer sequence CTCN PAM
ugccucagccucccgaguag

SEQ ID NO: 30168 - RNA, 20 nt, Artificial Sequence
  spacer sequence CTCN PAM
gccucccgaguagcugggau

SEQ ID NO: 30169 - RNA, 20 nt, Artificial Sequence
  spacer sequence CTCN PAM
cgaguagcugggauuacagg

SEQ ID NO: 30170 - RNA, 20 nt, Artificial Sequence
  spacer sequence CTCN PAM
ggaggcugaggcaggagaau

SEQ ID NO: 30171 - RNA, 20 nt, Artificial Sequence
  spacer sequence CTCN PAM
gcuaauuuuuguauauuuag

SEQ ID NO: 30172 - RNA, 20 nt, Artificial Sequence
  spacer sequence CTCN PAM
acuaaauauacaaaaauuag

SEQ ID NO: 30173 - RNA, 20 nt, Artificial Sequence
  spacer sequence CTCN PAM
ucucuacuaaauauacaaaa

SEQ ID NO: 30174 - RNA, 20 nt, Artificial Sequence
  spacer sequence CTCN PAM
ugaccucaggugauccgccu

SEQ ID NO: 30175 - RNA, 20 nt, Artificial Sequence
  spacer sequence CTCN PAM
ggugauccgccugccucgcc

SEQ ID NO: 30176 - RNA, 20 nt, Artificial Sequence
  spacer sequence CTCN PAM
cccuccagaucggauaaagu

SEQ ID NO: 30177 - RNA, 20 nt, Artificial Sequence
  spacer sequence CTCN PAM
agaucggauaaagugcugga

SEQ ID NO: 30178 - RNA, 20 nt, Artificial Sequence
  spacer sequence CTCN PAM
cgccuguaauuccagcacuu

SEQ ID NO: 30179 - RNA, 20 nt, Artificial Sequence
  spacer sequence CTCN PAM
aaugucugcuaaauaacccc

SEQ ID NO: 30180 - RNA, 20 nt, Artificial Sequence
  spacer sequence CTCN PAM
ggggccggggguuauuuagc

SEQ ID NO: 30181 - RNA, 20 nt, Artificial Sequence
  spacer sequence CTCN PAM
cucuguugcccaggcuaggc

SEQ ID NO: 30182 - RNA, 20 nt, Artificial Sequence
  spacer sequence CTCN PAM
guugcccaggcuaggcagug

SEQ ID NO: 30183 - RNA, 20 nt, Artificial Sequence
  spacer sequence CTCN PAM
cugcagccucaaucuccuua

SEQ ID NO: 30184 - RNA, 20 nt, Artificial Sequence
  spacer sequence CTCN PAM
aucuccuuaggcccaagcga

SEQ ID NO: 30185 - RNA, 20 nt, Artificial Sequence
  spacer sequence CTCN PAM
uuaggcccaagcgaugcucc

SEQ ID NO: 30186 - RNA, 20 nt, Artificial Sequence
  spacer sequence CTCN PAM
cgccucagccuccccaguag

SEQ ID NO: 30187 - RNA, 20 nt, Artificial Sequence
  spacer sequence CTCN PAM
gccuccccaguagcugggac

SEQ ID NO: 30188 - RNA, 20 nt, Artificial Sequence
  spacer sequence CTCN PAM
ccaguagcugggaccacagg

SEQ ID NO: 30189 - RNA, 20 nt, Artificial Sequence
  spacer sequence CTCN PAM
acaaauaaucaaaauuagcc

SEQ ID NO: 30190 - RNA, 20 nt, Artificial Sequence
  spacer sequence CTCN PAM
cucuguugcccagacugguc

SEQ ID NO: 30191 - RNA, 20 nt, Artificial Sequence
  spacer sequence CTCN PAM
guugcccagacuggucucca

SEQ ID NO: 30192 - RNA, 20 nt, Artificial Sequence
  spacer sequence CTCN PAM
aucuccuggggucaagugau

SEQ ID NO: 30193 - RNA, 20 nt, Artificial Sequence
  spacer sequence CTCN PAM
uggggucaagugauucuccu

SEQ ID NO: 30194 - RNA, 20 nt, Artificial Sequence
  spacer sequence CTCN PAM
ugccuuggccucucaaggug

SEQ ID NO: 30195 - RNA, 20 nt, Artificial Sequence
  spacer sequence CTCN PAM
caaggugcugggauuacagg

SEQ ID NO: 30196 - RNA, 20 nt, Artificial Sequence
  spacer sequence CTCN PAM
aggugcugggauuacagguu

SEQ ID NO: 30197 - RNA, 20 nt, Artificial Sequence
  spacer sequence CTCN PAM
aaccuguaaucccagcaccu

SEQ ID NO: 30198 - RNA, 20 nt, Artificial Sequence
  spacer sequence CTCN PAM
gggccaggugugguggcucc

SEQ ID NO: 30199 - RNA, 20 nt, Artificial Sequence
  spacer sequence CTCN PAM
uuggaugcagggcccuggau

SEQ ID NO: 30200 - RNA, 20 nt, Artificial Sequence
  spacer sequence CTCN PAM
uggccucaagugauccucug

SEQ ID NO: 30201 - RNA, 20 nt, Artificial Sequence
  spacer sequence CTCN PAM
agugauccucuggccucagc

SEQ ID NO: 30202 - RNA, 20 nt, Artificial Sequence
  spacer sequence CTCN PAM
ggccucagccuccuaaagcg

SEQ ID NO: 30203 - RNA, 20 nt, Artificial Sequence
  spacer sequence CTCN PAM
gccuccuaaagcgcugguau

SEQ ID NO: 30204 - RNA, 20 nt, Artificial Sequence
  spacer sequence CTCN PAM
uaaagcgcugguauuacagu

SEQ ID NO: 30205 - RNA, 20 nt, Artificial Sequence
  spacer sequence CTCN PAM
cgacuguaauaccagcgcuu

SEQ ID NO: 30206 - RNA, 20 nt, Artificial Sequence
  spacer sequence CTCN PAM
accucccaggacgguuucac

SEQ ID NO: 30207 - RNA, 20 nt, Artificial Sequence
  spacer sequence CTCN PAM
caggacgguuucaccgcccu

SEQ ID NO: 30208 - RNA, 20 nt, Artificial Sequence
  spacer sequence CTCN PAM
cgacggggcacugcgucguc

SEQ ID NO: 30209 - RNA, 20 nt, Artificial Sequence
  spacer sequence CTCN PAM
cggcagggcgcacgcgacgu

SEQ ID NO: 30210 - RNA, 20 nt, Artificial Sequence
  spacer sequence CTCN PAM
cgccgggacuccuccuccca

SEQ ID NO: 30211 - RNA, 20 nt, Artificial Sequence
  spacer sequence CTCN PAM
ccgggacuccuccucccaga

SEQ ID NO: 30212 - RNA, 20 nt, Artificial Sequence
  spacer sequence CTCN PAM
uccucccagacgucccugcg

SEQ ID NO: 30213 - RNA, 20 nt, Artificial Sequence
  spacer sequence CTCN PAM
ucccagacgucccugcgcgu

SEQ ID NO: 30214 - RNA, 20 nt, Artificial Sequence
  spacer sequence CTCN PAM
cagacgucccugcgcgucgu

SEQ ID NO: 30215 - RNA, 20 nt, Artificial Sequence
  spacer sequence CTCN PAM
ucgcccuccaggccgcccgc

SEQ ID NO: 30216 - RNA, 20 nt, Artificial Sequence
  spacer sequence CTCN PAM
cccuccaggccgcccgcgcc

SEQ ID NO: 30217 - RNA, 20 nt, Artificial Sequence
  spacer sequence CTCN PAM
aggccgcccgcgccgcgccg

SEQ ID NO: 30218 - RNA, 20 nt, Artificial Sequence
  spacer sequence CTCN PAM
ggcgcggcgcgggcggccug

SEQ ID NO: 30219 - RNA, 20 nt, Artificial Sequence
  spacer sequence CTCN PAM
gccgcccgggacuuggccgc

SEQ ID NO: 30220 - RNA, 20 nt, Artificial Sequence
  spacer sequence CTCN PAM
uccgccacgcccgugccuau

SEQ ID NO: 30221 - RNA, 20 nt, Artificial Sequence
  spacer sequence CTCN PAM
gcauaggcacgggcguggcg

SEQ ID NO: 30222 - RNA, 20 nt, Artificial Sequence
  spacer sequence CTCN PAM
ggccccaaccagauguccuu

SEQ ID NO: 30223 - RNA, 20 nt, Artificial Sequence
  spacer sequence CTCN PAM
cccacgcagguucgggcgcu

SEQ ID NO: 30224 - RNA, 20 nt, Artificial Sequence
  spacer sequence CTCN PAM
cacgcagguucgggcgcugc

SEQ ID NO: 30225 - RNA, 20 nt, Artificial Sequence
  spacer sequence CTCN PAM
guggccgccgcccccggagu

SEQ ID NO: 30226 - RNA, 20 nt, Artificial Sequence
  spacer sequence CTCN PAM
gggggcggcggccacggagg

SEQ ID NO: 30227 - RNA, 20 nt, Artificial Sequence
  spacer sequence CTCN PAM
gcuuccggggcgcgcggguc

SEQ ID NO: 30228 - RNA, 20 nt, Artificial Sequence
  spacer sequence CTCN PAM
gcccuggacccucggcccug

SEQ ID NO: 30229 - RNA, 20 nt, Artificial Sequence
  spacer sequence CTCN PAM
gcccugccucugcugcccga

SEQ ID NO: 30230 - RNA, 20 nt, Artificial Sequence
  spacer sequence CTCN PAM
gcugcccgagcccugcgcug

SEQ ID NO: 30231 - RNA, 20 nt, Artificial Sequence
  spacer sequence CTCN PAM
ggcagcagaggcagggccga

SEQ ID NO: 30232 - RNA, 20 nt, Artificial Sequence
  spacer sequence CTCN PAM
ucccgggcaccuccccgaga

SEQ ID NO: 30233 - RNA, 20 nt, Artificial Sequence
  spacer sequence CTCN PAM
ccgagauaagcgucuccugg

SEQ ID NO: 30234 - RNA, 20 nt, Artificial Sequence
  spacer sequence CTCN PAM
gggaggugcccgggacgagg

SEQ ID NO: 30235 - RNA, 20 nt, Artificial Sequence
  spacer sequence CTCN PAM
ugggugcccuccccgaucuc

SEQ ID NO: 30236 - RNA, 20 nt, Artificial Sequence
  spacer sequence CTCN PAM
ccgaucucccuggccaaagc

SEQ ID NO: 30237 - RNA, 20 nt, Artificial Sequence
  spacer sequence CTCN PAM
cuggccaaagccuggguguc

SEQ ID NO: 30238 - RNA, 20 nt, Artificial Sequence
  spacer sequence CTCN PAM
uucuacugauccgcgaaaug

SEQ ID NO: 30239 - RNA, 20 nt, Artificial Sequence
  spacer sequence CTCN PAM
acaguugcgccucauucuac

SEQ ID NO: 30240 - RNA, 20 nt, Artificial Sequence
  spacer sequence CTCN PAM
gugccucacaucagcgccag

SEQ ID NO: 30241 - RNA, 20 nt, Artificial Sequence
  spacer sequence CTCN PAM
caucagcgccagguccugcc

SEQ ID NO: 30242 - RNA, 20 nt, Artificial Sequence
  spacer sequence CTCN PAM
gccuguccugcuaaguaaug

SEQ ID NO: 30243 - RNA, 20 nt, Artificial Sequence
  spacer sequence CTCN PAM
ggucagcgugggcacgucca

SEQ ID NO: 30244 - RNA, 20 nt, Artificial Sequence
  spacer sequence CTCN PAM
gcaugcaccacgaccagccc

SEQ ID NO: 30245 - RNA, 20 nt, Artificial Sequence
  spacer sequence CTCN PAM
aaauacuuuggugaguccgg

SEQ ID NO: 30246 - RNA, 20 nt, Artificial Sequence
  spacer sequence CTCN PAM
ccaaaguauuuggagguggu

SEQ ID NO: 30247 - RNA, 20 nt, Artificial Sequence
  spacer sequence CTCN PAM
accggacucaccaaaguauu

SEQ ID NO: 30248 - RNA, 20 nt, Artificial Sequence
  spacer sequence CTCN PAM
acaucccaggucagucuccg

SEQ ID NO: 30249 - RNA, 20 nt, Artificial Sequence
  spacer sequence CTCN PAM
gucucaguugaggcugcgag

SEQ ID NO: 30250 - RNA, 20 nt, Artificial Sequence
  spacer sequence CTCN PAM
guugaggcugcgagaaaaaa

SEQ ID NO: 30251 - RNA, 20 nt, Artificial Sequence
  spacer sequence CTCN PAM
acugagacggagacugaccu

SEQ ID NO: 30252 - RNA, 20 nt, Artificial Sequence
  spacer sequence CTCN PAM
cagccucaacugagacggag

SEQ ID NO: 30253 - RNA, 20 nt, Artificial Sequence
  spacer sequence CTCN PAM
agccuguaaucccagcacuu

SEQ ID NO: 30254 - RNA, 20 nt, Artificial Sequence
  spacer sequence CTCN PAM
caaagugcugggauuacagg

SEQ ID NO: 30255 - RNA, 20 nt, Artificial Sequence
  spacer sequence CTCN PAM
gccucccaaagugcugggau

SEQ ID NO: 30256 - RNA, 20 nt, Artificial Sequence
  spacer sequence CTCN PAM
ggugauccaccugccucggc

SEQ ID NO: 30257 - RNA, 20 nt, Artificial Sequence
  spacer sequence CTCN PAM
gaacuucugaccucagguga

SEQ ID NO: 30258 - RNA, 20 nt, Artificial Sequence
  spacer sequence CTCN PAM
ucuaaaaauacagaaaacug

SEQ ID NO: 30259 - RNA, 20 nt, Artificial Sequence
  spacer sequence CTCN PAM
cgccuguaaucccagcacuu

SEQ ID NO: 30260 - RNA, 20 nt, Artificial Sequence
  spacer sequence CTCN PAM
caaagugcugggauuacagg

SEQ ID NO: 30261 - RNA, 20 nt, Artificial Sequence
  spacer sequence CTCN PAM
gccucccaaagugcugggau

SEQ ID NO: 30262 - RNA, 20 nt, Artificial Sequence
  spacer sequence CTCN PAM
ugauccccccgccucggccu

SEQ ID NO: 30263 - RNA, 20 nt, Artificial Sequence
  spacer sequence CTCN PAM
ugaccucgugauccccccgc

SEQ ID NO: 30264 - RNA, 20 nt, Artificial Sequence
  spacer sequence CTCN PAM
aucuccugaccucgugaucc

SEQ ID NO: 30265 - RNA, 20 nt, Artificial Sequence
  spacer sequence CTCN PAM
acuaaaaauacaaaaaauua

SEQ ID NO: 30266 - RNA, 20 nt, Artificial Sequence
  spacer sequence CTCN PAM
ugacuagcugggacuacagg

SEQ ID NO: 30267 - RNA, 20 nt, Artificial Sequence
  spacer sequence CTCN PAM
gccuccugacuagcugggac

SEQ ID NO: 30268 - RNA, 20 nt, Artificial Sequence
  spacer sequence CTCN PAM
ucagccuccugacuagcugg

SEQ ID NO: 30269 - RNA, 20 nt, Artificial Sequence
  spacer sequence CTCN PAM
agccugggcaacaagaguga

SEQ ID NO: 30270 - RNA, 20 nt, Artificial Sequence
  spacer sequence CTCN PAM
uguugcccaggcuggagugc

SEQ ID NO: 30271 - RNA, 20 nt, Artificial Sequence
  spacer sequence CTCN PAM
aucucaaauaagaaaaauac

SEQ ID NO: 30272 - RNA, 20 nt, Artificial Sequence
  spacer sequence CTCN PAM
aauaagaaaaauacaguuuu

SEQ ID NO: 30273 - RNA, 20 nt, Artificial Sequence
  spacer sequence CTCN PAM
guggacaaaccugcuaaaac

SEQ ID NO: 30274 - RNA, 20 nt, Artificial Sequence
  spacer sequence CTCN PAM
ucaguggacaaaccugcuaa

SEQ ID NO: 30275 - RNA, 20 nt, Artificial Sequence
  spacer sequence CTCN PAM
gguucgcuuucaucaccggc

SEQ ID NO: 30276 - RNA, 20 nt, Artificial Sequence
  spacer sequence CTCN PAM
cagccgguuuaugacuggcu

SEQ ID NO: 30277 - RNA, 20 nt, Artificial Sequence
  spacer sequence CTCN PAM
gccgguuuaugacuggcucu

SEQ ID NO: 30278 - RNA, 20 nt, Artificial Sequence
  spacer sequence CTCN PAM
ggaccaaccaauguaggaug

SEQ ID NO: 30279 - RNA, 20 nt, Artificial Sequence
  spacer sequence CTCN PAM
ugcuucgaccauccuacauu

SEQ ID NO: 30280 - RNA, 20 nt, Artificial Sequence
  spacer sequence CTCN PAM
gcacuuugggagacugaagu

SEQ ID NO: 30281 - RNA, 20 nt, Artificial Sequence
  spacer sequence CTCN PAM
caaagugcugagauuacagg

SEQ ID NO: 30282 - RNA, 20 nt, Artificial Sequence
  spacer sequence CTCN PAM
cacuucagucucccaaagug

SEQ ID NO: 30283 - RNA, 20 nt, Artificial Sequence
  spacer sequence CTCN PAM
ugggcuuaagcgauucuccc

SEQ ID NO: 30284 - RNA, 20 nt, Artificial Sequence
  spacer sequence CTCN PAM
aacuccugggcuuaagcgau

SEQ ID NO: 30285 - RNA, 20 nt, Artificial Sequence
  spacer sequence CTCN PAM
cuauguugccaaggcuaguc

SEQ ID NO: 30286 - RNA, 20 nt, Artificial Sequence
  spacer sequence CTCN PAM
acaaaaaauaaaaagaaacu

SEQ ID NO: 30287 - RNA, 20 nt, Artificial Sequence
  spacer sequence CTCN PAM
ccuggucaguuucuuuuuau

SEQ ID NO: 30288 - RNA, 20 nt, Artificial Sequence
  spacer sequence CTCN PAM
caccuguaauccuagcacuu

SEQ ID NO: 30289 - RNA, 20 nt, Artificial Sequence
  spacer sequence CTCN PAM
caccccggccuuccaaagug

SEQ ID NO: 30290 - RNA, 20 nt, Artificial Sequence
  spacer sequence CTCN PAM
ugagcccaggaguuugagac

SEQ ID NO: 30291 - RNA, 20 nt, Artificial Sequence
  spacer sequence CTCN PAM
agagacccucccaccccggc

SEQ ID NO: 30292 - RNA, 20 nt, Artificial Sequence
  spacer sequence CTCN PAM
ugggcucaagagacccuccc

SEQ ID NO: 30293 - RNA, 20 nt, Artificial Sequence
  spacer sequence CTCN PAM
aacuccugggcucaagagac

SEQ ID NO: 30294 - RNA, 20 nt, Artificial Sequence
  spacer sequence CTCN PAM
ggaggcugaagcaagaggac

SEQ ID NO: 30295 - RNA, 20 nt, Artificial Sequence
  spacer sequence CTCN PAM
cgaguagcugggacuacagg

SEQ ID NO: 30296 - RNA, 20 nt, Artificial Sequence
  spacer sequence CTCN PAM
ugcuucagccucccgaguag

SEQ ID NO: 30297 - RNA, 20 nt, Artificial Sequence
  spacer sequence CTCN PAM
cugcagccuugacuuccccg

SEQ ID NO: 30298 - RNA, 20 nt, Artificial Sequence
  spacer sequence CTCN PAM
ggcugaagugcaguggcaug

SEQ ID NO: 30299 - RNA, 20 nt, Artificial Sequence
  spacer sequence CTCN PAM
uguugcucaggcugaagugc

SEQ ID NO: 30300 - RNA, 20 nt, Artificial Sequence
  spacer sequence CTCN PAM
cucuuguugcucaggcugaa

SEQ ID NO: 30301 - RNA, 20 nt, Artificial Sequence
  spacer sequence CTCN PAM
aaaaaccauguugggagggc

SEQ ID NO: 30302 - RNA, 20 nt, Artificial Sequence
  spacer sequence CTCN PAM
caacaugguuuuuugagggg

SEQ ID NO: 30303 - RNA, 20 nt, Artificial Sequence
  spacer sequence CTCN PAM
ccuaaucugaucagcccucc

SEQ ID NO: 30304 - RNA, 20 nt, Artificial Sequence
  spacer sequence CTCN PAM
cugguuuccagugguggcca

SEQ ID NO: 30305 - RNA, 20 nt, Artificial Sequence
  spacer sequence CTCN PAM
gcuugccuuuggcccugacc

SEQ ID NO: 30306 - RNA, 20 nt, Artificial Sequence
  spacer sequence CTCN PAM
acccauggguggugggucag

SEQ ID NO: 30307 - RNA, 20 nt, Artificial Sequence
  spacer sequence CTCN PAM
gacccaccacccauggguug

SEQ ID NO: 30308 - RNA, 20 nt, Artificial Sequence
  spacer sequence CTCN PAM
cucugacccaccacccaugg

SEQ ID NO: 30309 - RNA, 20 nt, Artificial Sequence
  spacer sequence CTCN PAM
guccccaggcagugcuuuug

SEQ ID NO: 30310 - RNA, 20 nt, Artificial Sequence
  spacer sequence CTCN PAM
agcuucuaguccuuucuugc

SEQ ID NO: 30311 - RNA, 20 nt, Artificial Sequence
  spacer sequence CTCN PAM
agcaguugcccgccauguug

SEQ ID NO: 30312 - RNA, 20 nt, Artificial Sequence
  spacer sequence CTCN PAM
ggacacagacuuggauguuu

SEQ ID NO: 30313 - RNA, 20 nt, Artificial Sequence
  spacer sequence CTCN PAM
acaaacauccaagucugugu

SEQ ID NO: 30314 - RNA, 20 nt, Artificial Sequence
  spacer sequence CTCN PAM
ugguucacagggggcucugg

SEQ ID NO: 30315 - RNA, 20 nt, Artificial Sequence
  spacer sequence CTCN PAM
ggacuugaccaggggagucc

SEQ ID NO: 30316 - RNA, 20 nt, Artificial Sequence
  spacer sequence CTCN PAM
ccuggucaaguccagagccc

SEQ ID NO: 30317 - RNA, 20 nt, Artificial Sequence
  spacer sequence CTCN PAM
gggacuccccuggucaaguc

SEQ ID NO: 30318 - RNA, 20 nt, Artificial Sequence
  spacer sequence CTCN PAM
cgccuuccccccgccccauu

SEQ ID NO: 30319 - RNA, 20 nt, Artificial Sequence
  spacer sequence CTCN PAM
cugggggaauggggcggggg

SEQ ID NO: 30320 - RNA, 20 nt, Artificial Sequence
  spacer sequence CTCN PAM
ucggugcaguuguuggccga

SEQ ID NO: 30321 - RNA, 20 nt, Artificial Sequence
  spacer sequence CTCN PAM
ucggccaacaacugcaccga

SEQ ID NO: 30322 - RNA, 20 nt, Artificial Sequence
  spacer sequence CTCN PAM
cccccagguccaacaugucc

SEQ ID NO: 30323 - RNA, 20 nt, Artificial Sequence
  spacer sequence CTCN PAM
gacacucacccccaggucca

SEQ ID NO: 30324 - RNA, 20 nt, Artificial Sequence
  spacer sequence CTCN PAM
gguccccucugacacucacc

SEQ ID NO: 30325 - RNA, 20 nt, Artificial Sequence
  spacer sequence CTCN PAM
gcagguuggagcuguccagg

SEQ ID NO: 30326 - RNA, 20 nt, Artificial Sequence
  spacer sequence CTCN PAM
aaccugcugagccucagguc

SEQ ID NO: 30327 - RNA, 20 nt, Artificial Sequence
  spacer sequence CTCN PAM
cccgcagccuggacagcucc

SEQ ID NO: 30328 - RNA, 20 nt, Artificial Sequence
  spacer sequence CTCN PAM
cucccccgcagccuggacag

SEQ ID NO: 30329 - RNA, 20 nt, Artificial Sequence
  spacer sequence CTCN PAM
uggucccccagcgcucccuc

SEQ ID NO: 30330 - RNA, 20 nt, Artificial Sequence
  spacer sequence CTCN PAM
ccgccccucaaccccuugca

SEQ ID NO: 30331 - RNA, 20 nt, Artificial Sequence
  spacer sequence CTCN PAM
accccuugcaggcagccaag

SEQ ID NO: 30332 - RNA, 20 nt, Artificial Sequence
  spacer sequence CTCN PAM
aaguuugccuuggcugccug

SEQ ID NO: 30333 - RNA, 20 nt, Artificial Sequence
  spacer sequence CTCN PAM
gccugggccuucuccaaguu

SEQ ID NO: 30334 - RNA, 20 nt, Artificial Sequence
  spacer sequence CTCN PAM
ucagcuguccccaccagcuc

SEQ ID NO: 30335 - RNA, 20 nt, Artificial Sequence
  spacer sequence CTCN PAM
gcccgcguggccucgucagc

SEQ ID NO: 30336 - RNA, 20 nt, Artificial Sequence
  spacer sequence CTCN PAM
auucggaucuggaucucugc

SEQ ID NO: 30337 - RNA, 20 nt, Artificial Sequence
  spacer sequence CTCN PAM
uuggccucgauucggaucug

SEQ ID NO: 30338 - RNA, 20 nt, Artificial Sequence
  spacer sequence CTCN PAM
agggccuucaccagggccuc

SEQ ID NO: 30339 - RNA, 20 nt, Artificial Sequence
  spacer sequence CTCN PAM
ggacaccggguacgcaccgc

SEQ ID NO: 30340 - RNA, 20 nt, Artificial Sequence
  spacer sequence CTCN PAM
uggggucccggccaccuggg

SEQ ID NO: 30341 - RNA, 20 nt, Artificial Sequence
  spacer sequence CTCN PAM
uuggcaggcgcggcuucccc

SEQ ID NO: 30342 - RNA, 20 nt, Artificial Sequence
  spacer sequence CTCN PAM
gguggccuccuuggcaggcg

SEQ ID NO: 30343 - RNA, 20 nt, Artificial Sequence
  spacer sequence CTCN PAM
ggggacugggccagggaagc

SEQ ID NO: 30344 - RNA, 20 nt, Artificial Sequence
  spacer sequence CTCN PAM
uccucagcuuugagcugugg

SEQ ID NO: 30345 - RNA, 20 nt, Artificial Sequence
  spacer sequence CTCN PAM
ucagcuuugagcuguggcug

SEQ ID NO: 30346 - RNA, 20 nt, Artificial Sequence
  spacer sequence CTCN PAM
gcuuugagcuguggcugcca

SEQ ID NO: 30347 - RNA, 20 nt, Artificial Sequence
  spacer sequence CTCN PAM
aagcugaggaggagcuuccc

SEQ ID NO: 30348 - RNA, 20 nt, Artificial Sequence
  spacer sequence CTCN PAM
ccuuccgccucucaagaucc

SEQ ID NO: 30349 - RNA, 20 nt, Artificial Sequence
  spacer sequence CTCN PAM
uuccgccucucaagaucccc

SEQ ID NO: 30350 - RNA, 20 nt, Artificial Sequence
  spacer sequence CTCN PAM
caagauccccccagccugac

SEQ ID NO: 30351 - RNA, 20 nt, Artificial Sequence
  spacer sequence CTCN PAM
agauccccccagccugacgg

SEQ ID NO: 30352 - RNA, 20 nt, Artificial Sequence
  spacer sequence CTCN PAM
gcccugcagagccagccgcc

SEQ ID NO: 30353 - RNA, 20 nt, Artificial Sequence
  spacer sequence CTCN PAM
gcagggcagaggggauggua

SEQ ID NO: 30354 - RNA, 20 nt, Artificial Sequence
  spacer sequence CTCN PAM
gcuucggagccaccucugga

SEQ ID NO: 30355 - RNA, 20 nt, Artificial Sequence
  spacer sequence CTCN PAM
gaagcugaggucaaccuugg

SEQ ID NO: 30356 - RNA, 20 nt, Artificial Sequence
  spacer sequence CTCN PAM
ggaugaacugcccccagccc

SEQ ID NO: 30357 - RNA, 20 nt, Artificial Sequence
  spacer sequence CTCN PAM
gcucuuguuccuccaccugg

SEQ ID NO: 30358 - RNA, 20 nt, Artificial Sequence
  spacer sequence CTCN PAM
uguuccuccaccuggcccgg

SEQ ID NO: 30359 - RNA, 20 nt, Artificial Sequence
  spacer sequence CTCN PAM
accuggcccggugaagccgg

SEQ ID NO: 30360 - RNA, 20 nt, Artificial Sequence
  spacer sequence CTCN PAM
cggcuucaccgggccaggug

SEQ ID NO: 30361 - RNA, 20 nt, Artificial Sequence
  spacer sequence CTCN PAM
cguccuccaugucccuugca

SEQ ID NO: 30362 - RNA, 20 nt, Artificial Sequence
  spacer sequence CTCN PAM
augucccuugcaaauagggc

SEQ ID NO: 30363 - RNA, 20 nt, Artificial Sequence
  spacer sequence CTCN PAM
aaggcccuauuugcaaggga

SEQ ID NO: 30364 - RNA, 20 nt, Artificial Sequence
  spacer sequence CTCN PAM
ccuggacuaugucccuuagg

SEQ ID NO: 30365 - RNA, 20 nt, Artificial Sequence
  spacer sequence CTCN PAM
aggugcccuaagggacauag

SEQ ID NO: 30366 - RNA, 20 nt, Artificial Sequence
  spacer sequence CTCN PAM
aggggguggguggggugcag

SEQ ID NO: 30367 - RNA, 20 nt, Artificial Sequence
  spacer sequence CTCN PAM
agccugcuuccuacggaccu

SEQ ID NO: 30368 - RNA, 20 nt, Artificial Sequence
  spacer sequence CTCN PAM
ccaccguuguagggugaagg

SEQ ID NO: 30369 - RNA, 20 nt, Artificial Sequence
  spacer sequence CTCN PAM
cugaccgauguccccaucac

SEQ ID NO: 30370 - RNA, 20 nt, Artificial Sequence
  spacer sequence CTCN PAM
uggcgccucugccgaguucc

SEQ ID NO: 30371 - RNA, 20 nt, Artificial Sequence
  spacer sequence CTCN PAM
gccgaguuccuggucuccag

SEQ ID NO: 30372 - RNA, 20 nt, Artificial Sequence
  spacer sequence CTCN PAM
gcagaggcgccaggagcagc

SEQ ID NO: 30373 - RNA, 20 nt, Artificial Sequence
  spacer sequence CTCN PAM
aggccuugacccugagcccu

SEQ ID NO: 30374 - RNA, 20 nt, Artificial Sequence
  spacer sequence CTCN PAM
gggucaaggccuggagacca

SEQ ID NO: 30375 - RNA, 20 nt, Artificial Sequence
  spacer sequence CTCN PAM
ggaaagaggcgggccccacc

SEQ ID NO: 30376 - RNA, 20 nt, Artificial Sequence
  spacer sequence CTCN PAM
uuccagaggcuggugggcag

SEQ ID NO: 30377 - RNA, 20 nt, Artificial Sequence
  spacer sequence CTCN PAM
cacgcuggccccgcccugug

SEQ ID NO: 30378 - RNA, 20 nt, Artificial Sequence
  spacer sequence CTCN PAM
gugggcaccuaggcuucugg

SEQ ID NO: 30379 - RNA, 20 nt, Artificial Sequence
  spacer sequence CTCN PAM
aucuggggccaacccagaag

SEQ ID NO: 30380 - RNA, 20 nt, Artificial Sequence
  spacer sequence CTCN PAM
ugggcccaccccacuccauc

SEQ ID NO: 30381 - RNA, 20 nt, Artificial Sequence
  spacer sequence CTCN PAM
cuggcacugccccguugggc

SEQ ID NO: 30382 - RNA, 20 nt, Artificial Sequence
  spacer sequence CTCN PAM
ucuccuuuccauaacccugg

SEQ ID NO: 30383 - RNA, 20 nt, Artificial Sequence
  spacer sequence CTCN PAM
uuuccauaacccugggggcg

SEQ ID NO: 30384 - RNA, 20 nt, Artificial Sequence
  spacer sequence CTCN PAM
agcugguguguggacggcgg

SEQ ID NO: 30385 - RNA, 20 nt, Artificial Sequence
  spacer sequence CTCN PAM
ugaccuccucccuuccuugg

SEQ ID NO: 30386 - RNA, 20 nt, Artificial Sequence
  spacer sequence CTCN PAM
ucccuuccuugggacagggc

SEQ ID NO: 30387 - RNA, 20 nt, Artificial Sequence
  spacer sequence CTCN PAM
cuuccuugggacagggcccu

SEQ ID NO: 30388 - RNA, 20 nt, Artificial Sequence
  spacer sequence CTCN PAM
ccccccuggaauucccugcc

SEQ ID NO: 30389 - RNA, 20 nt, Artificial Sequence
  spacer sequence CTCN PAM
ccacucaccccccuggaauu

SEQ ID NO: 30390 - RNA, 20 nt, Artificial Sequence
  spacer sequence CTCN PAM
agugacacaggcaggcccac

SEQ ID NO: 30391 - RNA, 20 nt, Artificial Sequence
  spacer sequence CTCN PAM
gucaccaucccagcuccagu

SEQ ID NO: 30392 - RNA, 20 nt, Artificial Sequence
  spacer sequence CTCN PAM
cugucaccaucccagcucca

SEQ ID NO: 30393 - RNA, 20 nt, Artificial Sequence
  spacer sequence CTCN PAM
cucccacgucauggcacuau

SEQ ID NO: 30394 - RNA, 20 nt, Artificial Sequence
  spacer sequence CTCN PAM
cacgucauggcacuaugcgg

SEQ ID NO: 30395 - RNA, 20 nt, Artificial Sequence
  spacer sequence CTCN PAM
agugaagcuguggcaaguca

SEQ ID NO: 30396 - RNA, 20 nt, Artificial Sequence
  spacer sequence CTCN PAM
ccucaagugaagcuguggca

SEQ ID NO: 30397 - RNA, 20 nt, Artificial Sequence
  spacer sequence CTCN PAM
gaggccgccggucagcagau

SEQ ID NO: 30398 - RNA, 20 nt, Artificial Sequence
  spacer sequence CTCN PAM
gagucgcaaggcccccaacg

SEQ ID NO: 30399 - RNA, 20 nt, Artificial Sequence
  spacer sequence CTCN PAM
cccuccacuugggccucggg

SEQ ID NO: 30400 - RNA, 20 nt, Artificial Sequence
  spacer sequence CTCN PAM
acuugggccucgggacacga

SEQ ID NO: 30401 - RNA, 20 nt, Artificial Sequence
  spacer sequence CTCN PAM
ggacacgagugaccaggccc

SEQ ID NO: 30402 - RNA, 20 nt, Artificial Sequence
  spacer sequence CTCN PAM
ugucccgaggcccaagugga

SEQ ID NO: 30403 - RNA, 20 nt, Artificial Sequence
  spacer sequence CTCN PAM
aggaauccgcagcccaggga

SEQ ID NO: 30404 - RNA, 20 nt, Artificial Sequence
  spacer sequence CTCN PAM
uguggccugguggcugacac

SEQ ID NO: 30405 - RNA, 20 nt, Artificial Sequence
  spacer sequence CTCN PAM
gcccaggcccccccuccccc

SEQ ID NO: 30406 - RNA, 20 nt, Artificial Sequence
  spacer sequence CTCN PAM
cccccgcccccaguuccagc

SEQ ID NO: 30407 - RNA, 20 nt, Artificial Sequence
  spacer sequence CTCN PAM
cgcugggccccugcuaaguc

SEQ ID NO: 30408 - RNA, 20 nt, Artificial Sequence
  spacer sequence CTCN PAM
ucccgcugggccccugcuaa

SEQ ID NO: 30409 - RNA, 20 nt, Artificial Sequence
  spacer sequence CTCN PAM
cuccggggaccuccccugcc

SEQ ID NO: 30410 - RNA, 20 nt, Artificial Sequence
  spacer sequence CTCN PAM
ggggaccuccccugccccca

SEQ ID NO: 30411 - RNA, 20 nt, Artificial Sequence
  spacer sequence CTCN PAM
ccugcccccaccaccaggga

SEQ ID NO: 30412 - RNA, 20 nt, Artificial Sequence
  spacer sequence CTCN PAM
cugguggugggggcagggga

SEQ ID NO: 30413 - RNA, 20 nt, Artificial Sequence
  spacer sequence CTCN PAM
aagguucacacccucccugg

SEQ ID NO: 30414 - RNA, 20 nt, Artificial Sequence
  spacer sequence CTCN PAM
ggacacccgagacaccugac

SEQ ID NO: 30415 - RNA, 20 nt, Artificial Sequence
  spacer sequence CTCN PAM
gguguccugaggccuggcuc

SEQ ID NO: 30416 - RNA, 20 nt, Artificial Sequence
  spacer sequence CTCN PAM
gagggaacagcccgugcugg

SEQ ID NO: 30417 - RNA, 20 nt, Artificial Sequence
  spacer sequence CTCN PAM
gagugucaggugucucgggu

SEQ ID NO: 30418 - RNA, 20 nt, Artificial Sequence
  spacer sequence CTCN PAM
aggacgcauccagccagcac

SEQ ID NO: 30419 - RNA, 20 nt, Artificial Sequence
  spacer sequence CTCN PAM
ugcuccaggacgcauccagc

SEQ ID NO: 30420 - RNA, 20 nt, Artificial Sequence
  spacer sequence CTCN PAM
cugaagggccuugaccgccu

SEQ ID NO: 30421 - RNA, 20 nt, Artificial Sequence
  spacer sequence CTCN PAM
cuaagccaggggcugcccuc

SEQ ID NO: 30422 - RNA, 20 nt, Artificial Sequence
  spacer sequence CTCN PAM
guucugccucacuaagccag

SEQ ID NO: 30423 - RNA, 20 nt, Artificial Sequence
  spacer sequence CTCN PAM
accauggggacgccgaguau

SEQ ID NO: 30424 - RNA, 20 nt, Artificial Sequence
  spacer sequence CTCN PAM
gcguccccaugguugagugg

SEQ ID NO: 30425 - RNA, 20 nt, Artificial Sequence
  spacer sequence CTCN PAM
gggcaucugguccccaaagg

SEQ ID NO: 30426 - RNA, 20 nt, Artificial Sequence
  spacer sequence CTCN PAM
cgaccagacugaggugaugg

SEQ ID NO: 30427 - RNA, 20 nt, Artificial Sequence
  spacer sequence CTCN PAM
gucuggucgggaguggaaug

SEQ ID NO: 30428 - RNA, 20 nt, Artificial Sequence
  spacer sequence CTCN PAM
cgaccagacugaggugacgg

SEQ ID NO: 30429 - RNA, 20 nt, Artificial Sequence
  spacer sequence CTCN PAM
gucuggucgggaguggaaug

SEQ ID NO: 30430 - RNA, 20 nt, Artificial Sequence
  spacer sequence CTCN PAM
cgaccagacugaggugacgg

SEQ ID NO: 30431 - RNA, 20 nt, Artificial Sequence
  spacer sequence CTCN PAM
gucuggucgggaguggaaug

SEQ ID NO: 30432 - RNA, 20 nt, Artificial Sequence
  spacer sequence CTCN PAM
cgaccagacugaggugacgg

SEQ ID NO: 30433 - RNA, 20 nt, Artificial Sequence
  spacer sequence CTCN PAM
gucuggucgggaguggaaug

SEQ ID NO: 30434 - RNA, 20 nt, Artificial Sequence
  spacer sequence CTCN PAM
gccaccugcacaccgucacc

SEQ ID NO: 30435 - RNA, 20 nt, Artificial Sequence
  spacer sequence CTCN PAM
uguguggcucugccaccugc

SEQ ID NO: 30436 - RNA, 20 nt, Artificial Sequence
  spacer sequence CTCN PAM
cguguguggcucugccaccu

SEQ ID NO: 30437 - RNA, 20 nt, Artificial Sequence
  spacer sequence CTCN PAM
ugccucucguguguggcucu

SEQ ID NO: 30438 - RNA, 20 nt, Artificial Sequence
  spacer sequence CTCN PAM
cugccucuugccucucgugu

SEQ ID NO: 30439 - RNA, 20 nt, Artificial Sequence
  spacer sequence CTCN PAM
cucccugccucuugccucuc

SEQ ID NO: 30440 - RNA, 20 nt, Artificial Sequence
  spacer sequence CTCN PAM
cagggggccccaguguccug

SEQ ID NO: 30441 - RNA, 20 nt, Artificial Sequence
  spacer sequence CTCN PAM
uuuggcaccaguccacggcu

SEQ ID NO: 30442 - RNA, 20 nt, Artificial Sequence
  spacer sequence CTCN PAM
cuccgccaccuuuguucuca

SEQ ID NO: 30443 - RNA, 20 nt, Artificial Sequence
  spacer sequence CTCN PAM
gccaccuuuguucucacugg

SEQ ID NO: 30444 - RNA, 20 nt, Artificial Sequence
  spacer sequence CTCN PAM
cuggaagcagaaugagccug

SEQ ID NO: 30445 - RNA, 20 nt, Artificial Sequence
  spacer sequence CTCN PAM
uucugcuuccagugagaaca

SEQ ID NO: 30446 - RNA, 20 nt, Artificial Sequence
  spacer sequence CTCN PAM
ucccuccaacuggguccagu

SEQ ID NO: 30447 - RNA, 20 nt, Artificial Sequence
  spacer sequence CTCN PAM
cuccaacuggguccaguuca

SEQ ID NO: 30448 - RNA, 20 nt, Artificial Sequence
  spacer sequence CTCN PAM
aacuggguccaguucacuaa

SEQ ID NO: 30449 - RNA, 20 nt, Artificial Sequence
  spacer sequence CTCN PAM
cagaacugcucaagccauuc

SEQ ID NO: 30450 - RNA, 20 nt, Artificial Sequence
  spacer sequence CTCN PAM
agccauucccacuuccugga

SEQ ID NO: 30451 - RNA, 20 nt, Artificial Sequence
  spacer sequence CTCN PAM
aaaaaaaaaaaaaaaaaaaa

SEQ ID NO: 30452 - RNA, 20 nt, Artificial Sequence
  spacer sequence CTCN PAM
caaaaaaaaaaaaaaaaaaa

SEQ ID NO: 30453 - RNA, 20 nt, Artificial Sequence
  spacer sequence CTCN PAM
ucucaaaaaaaaaaaaaaaa

SEQ ID NO: 30454 - RNA, 20 nt, Artificial Sequence
  spacer sequence CTCN PAM
uauugcccaggcuggagugc

SEQ ID NO: 30455 - RNA, 20 nt, Artificial Sequence
  spacer sequence CTCN PAM
agccugggcaauaagagcga

SEQ ID NO: 30456 - RNA, 20 nt, Artificial Sequence
  spacer sequence CTCN PAM
gcucaccacaaucuccgucu

SEQ ID NO: 30457 - RNA, 20 nt, Artificial Sequence
  spacer sequence CTCN PAM
ccacaaucuccgucucccgg

SEQ ID NO: 30458 - RNA, 20 nt, Artificial Sequence
  spacer sequence CTCN PAM
gucucccggguucgagcaau

SEQ ID NO: 30459 - RNA, 20 nt, Artificial Sequence
  spacer sequence CTCN PAM
cggguucgagcaaugcuccc

SEQ ID NO: 30460 - RNA, 20 nt, Artificial Sequence
  spacer sequence CTCN PAM
aacccgggagacggagauug

SEQ ID NO: 30461 - RNA, 20 nt, Artificial Sequence
  spacer sequence CTCN PAM
cgccucagccucccaaguag

SEQ ID NO: 30462 - RNA, 20 nt, Artificial Sequence
  spacer sequence CTCN PAM
gccucccaaguagcugagau

SEQ ID NO: 30463 - RNA, 20 nt, Artificial Sequence
  spacer sequence CTCN PAM
caaguagcugagauuacagg

SEQ ID NO: 30464 - RNA, 20 nt, Artificial Sequence
  spacer sequence CTCN PAM
gcuacuugggaggcugaggc

SEQ ID NO: 30465 - RNA, 20 nt, Artificial Sequence
  spacer sequence CTCN PAM
aacuccugaccucgugaucc

SEQ ID NO: 30466 - RNA, 20 nt, Artificial Sequence
  spacer sequence CTCN PAM
ugaccucgugauccgcccgc

SEQ ID NO: 30467 - RNA, 20 nt, Artificial Sequence
  spacer sequence CTCN PAM
ugauccgcccgccucggccu

SEQ ID NO: 30468 - RNA, 20 nt, Artificial Sequence
  spacer sequence CTCN PAM
gccucccaaagugccaggau

SEQ ID NO: 30469 - RNA, 20 nt, Artificial Sequence
  spacer sequence CTCN PAM
caaagugccaggauuacagg

SEQ ID NO: 30470 - RNA, 20 nt, Artificial Sequence
  spacer sequence CTCN PAM
ugccuguaauccuggcacuu

SEQ ID NO: 30471 - RNA, 20 nt, Artificial Sequence
  spacer sequence CTCN PAM
aaaaaaaaaaaaaaaaaaaa

SEQ ID NO: 30472 - RNA, 20 nt, Artificial Sequence
  spacer sequence CTCN PAM
uuuugucgcucaggcuggag

SEQ ID NO: 30473 - RNA, 20 nt, Artificial Sequence
  spacer sequence CTCN PAM
ggcuggagugcccuggcacg

SEQ ID NO: 30474 - RNA, 20 nt, Artificial Sequence
  spacer sequence CTCN PAM
agccugagcgacaaaacgag

SEQ ID NO: 30475 - RNA, 20 nt, Artificial Sequence
  spacer sequence CTCN PAM
gccucccgcguucaagcgau

SEQ ID NO: 30476 - RNA, 20 nt, Artificial Sequence
  spacer sequence CTCN PAM
cgcguucaagcgauucuccu

SEQ ID NO: 30477 - RNA, 20 nt, Artificial Sequence
  spacer sequence CTCN PAM
ugccucagccuccugaguag

SEQ ID NO: 30478 - RNA, 20 nt, Artificial Sequence
  spacer sequence CTCN PAM
gccuccugaguagcugggac

SEQ ID NO: 30479 - RNA, 20 nt, Artificial Sequence
  spacer sequence CTCN PAM
ugaguagcugggacuacaga

SEQ ID NO: 30480 - RNA, 20 nt, Artificial Sequence
  spacer sequence CTCN PAM
ggaggcugaggcaggagaau

SEQ ID NO: 30481 - RNA, 20 nt, Artificial Sequence
  spacer sequence CTCN PAM
acuaaaaauacaaaaauuag

SEQ ID NO: 30482 - RNA, 20 nt, Artificial Sequence
  spacer sequence CTCN PAM
aucucuugaccuugugaucc

SEQ ID NO: 30483 - RNA, 20 nt, Artificial Sequence
  spacer sequence CTCN PAM
ugaccuugugauccgcccgc

SEQ ID NO: 30484 - RNA, 20 nt, Artificial Sequence
  spacer sequence CTCN PAM
gccucccaaagugcugggau

SEQ ID NO: 30485 - RNA, 20 nt, Artificial Sequence
  spacer sequence CTCN PAM
caaagugcugggauuacagg

SEQ ID NO: 30486 - RNA, 20 nt, Artificial Sequence
  spacer sequence CTCN PAM
cgccuguaaucccagcacuu

SEQ ID NO: 30487 - RNA, 20 nt, Artificial Sequence
  spacer sequence CTCN PAM
uagucauuccucaaaccgca

SEQ ID NO: 30488 - RNA, 20 nt, Artificial Sequence
  spacer sequence CTCN PAM
aaccgcagccccugugaccc

SEQ ID NO: 30489 - RNA, 20 nt, Artificial Sequence
  spacer sequence CTCN PAM
cccucucuggccuagcccug

SEQ ID NO: 30490 - RNA, 20 nt, Artificial Sequence
  spacer sequence CTCN PAM
cucucuggccuagcccugac

SEQ ID NO: 30491 - RNA, 20 nt, Artificial Sequence
  spacer sequence CTCN PAM
cuggccuagcccugacccuu

SEQ ID NO: 30492 - RNA, 20 nt, Artificial Sequence
  spacer sequence CTCN PAM
ggccuagcccugacccuucg

SEQ ID NO: 30493 - RNA, 20 nt, Artificial Sequence
  spacer sequence CTCN PAM
cggcagccguggcccccacc

SEQ ID NO: 30494 - RNA, 20 nt, Artificial Sequence
  spacer sequence CTCN PAM
uuccggcugccacccaugcu

SEQ ID NO: 30495 - RNA, 20 nt, Artificial Sequence
  spacer sequence CTCN PAM
ccaggucuccuuccggcugc

SEQ ID NO: 30496 - RNA, 20 nt, Artificial Sequence
  spacer sequence CTCN PAM
uccccaggucuccuuccggc

SEQ ID NO: 30497 - RNA, 20 nt, Artificial Sequence
  spacer sequence CTCN PAM
cagggcugcgcuccucccca

SEQ ID NO: 30498 - RNA, 20 nt, Artificial Sequence
  spacer sequence CTCN PAM
acccccacccuggccauggg

SEQ ID NO: 30499 - RNA, 20 nt, Artificial Sequence
  spacer sequence CTCN PAM
cuuuaucuggccugaccacc

SEQ ID NO: 30500 - RNA, 20 nt, Artificial Sequence
  spacer sequence CTCN PAM
ucuggccccucccuuuaucu

SEQ ID NO: 30501 - RNA, 20 nt, Artificial Sequence
  spacer sequence CTCN PAM
uguccacucaucuggccccu

SEQ ID NO: 30502 - RNA, 20 nt, Artificial Sequence
  spacer sequence CTCN PAM
cguaggaaugggguccccuu

SEQ ID NO: 30503 - RNA, 20 nt, Artificial Sequence
  spacer sequence CTCN PAM
aaauagaggggcaggacggg

SEQ ID NO: 30504 - RNA, 20 nt, Artificial Sequence
  spacer sequence CTCN PAM
auuuagagaaggggacccca

SEQ ID NO: 30505 - RNA, 20 nt, Artificial Sequence
  spacer sequence CTCN PAM
accaggaccauccucaaaaa

SEQ ID NO: 30506 - RNA, 20 nt, Artificial Sequence
  spacer sequence CTCN PAM
aaaagccgacggggaagggu

SEQ ID NO: 30507 - RNA, 20 nt, Artificial Sequence
  spacer sequence CTCN PAM
cccuuccccgucggcuuuuu

SEQ ID NO: 30508 - RNA, 20 nt, Artificial Sequence
  spacer sequence CTCN PAM
uuggcuguggccucaguuuc

SEQ ID NO: 30509 - RNA, 20 nt, Artificial Sequence
  spacer sequence CTCN PAM
guuucuucaucuguaaaaug

SEQ ID NO: 30510 - RNA, 20 nt, Artificial Sequence
  spacer sequence CTCN PAM
ccacacucccacccacccug

SEQ ID NO: 30511 - RNA, 20 nt, Artificial Sequence
  spacer sequence CTCN PAM
cacccacccuggagaaacug

SEQ ID NO: 30512 - RNA, 20 nt, Artificial Sequence
  spacer sequence CTCN PAM
agggugggugggaguguggu

SEQ ID NO: 30513 - RNA, 20 nt, Artificial Sequence
  spacer sequence CTCN PAM
guuucuccaggguggguggg

SEQ ID NO: 30514 - RNA, 20 nt, Artificial Sequence
  spacer sequence CTCN PAM
aagccucaguuucuccaggg

SEQ ID NO: 30515 - RNA, 20 nt, Artificial Sequence
  spacer sequence CTCN PAM
ccaagccucaguuucuccag

SEQ ID NO: 30516 - RNA, 20 nt, Artificial Sequence
  spacer sequence CTCN PAM
cggggucacagcauagccgg

SEQ ID NO: 30517 - RNA, 20 nt, Artificial Sequence
  spacer sequence CTCN PAM
auaaaugcccucugagguca

SEQ ID NO: 30518 - RNA, 20 nt, Artificial Sequence
  spacer sequence CTCN PAM
gaggucaccauugacagaug

SEQ ID NO: 30519 - RNA, 20 nt, Artificial Sequence
  spacer sequence CTCN PAM
gagggcauuuauggagcgau

SEQ ID NO: 30520 - RNA, 20 nt, Artificial Sequence
  spacer sequence CTCN PAM
ugcaucugucaauggugacc

SEQ ID NO: 30521 - RNA, 20 nt, Artificial Sequence
  spacer sequence CTCN PAM
acggcaggugacuccagccu

SEQ ID NO: 30522 - RNA, 20 nt, Artificial Sequence
  spacer sequence CTCN PAM
agccuguuuuccuggacgac

SEQ ID NO: 30523 - RNA, 20 nt, Artificial Sequence
  spacer sequence CTCN PAM
ggccccucuucccguccccc

SEQ ID NO: 30524 - RNA, 20 nt, Artificial Sequence
  spacer sequence CTCN PAM
ucccgucccccccacgcggg

SEQ ID NO: 30525 - RNA, 20 nt, Artificial Sequence
  spacer sequence CTCN PAM
cugccccgcccccuuccugu

SEQ ID NO: 30526 - RNA, 20 nt, Artificial Sequence
  spacer sequence CTCN PAM
gcccgcggcgaggcgggccg

SEQ ID NO: 30527 - RNA, 20 nt, Artificial Sequence
  spacer sequence CTCN PAM
ccgcgggcugagaugcaccc

SEQ ID NO: 30528 - RNA, 20 nt, Artificial Sequence
  spacer sequence CTCN PAM
gcccgccucgccgcgggcug

SEQ ID NO: 30529 - RNA, 20 nt, Artificial Sequence
  spacer sequence CTCN PAM
gggcauucaaggggaguccc

SEQ ID NO: 30530 - RNA, 20 nt, Artificial Sequence
  spacer sequence CTCN PAM
ccuugaaugccccgagccaa

SEQ ID NO: 30531 - RNA, 20 nt, Artificial Sequence
  spacer sequence CTCN PAM
accccgagggaaggcggcgc

SEQ ID NO: 30532 - RNA, 20 nt, Artificial Sequence
  spacer sequence CTCN PAM
ggguggaguuagggcgggca

SEQ ID NO: 30533 - RNA, 20 nt, Artificial Sequence
  spacer sequence CTCN PAM
gccuuuauccgcgccgccuu

SEQ ID NO: 30534 - RNA, 20 nt, Artificial Sequence
  spacer sequence CTCN PAM
cagcacuuggagcgcagaac

SEQ ID NO: 30535 - RNA, 20 nt, Artificial Sequence
  spacer sequence CTCN PAM
aagugcugcgaguaccuucg

SEQ ID NO: 30536 - RNA, 20 nt, Artificial Sequence
  spacer sequence CTCN PAM
ccgggcgcggccgguucugc

SEQ ID NO: 30537 - RNA, 20 nt, Artificial Sequence
  spacer sequence CTCN PAM
acacucaccgggcgcggccg

SEQ ID NO: 30538 - RNA, 20 nt, Artificial Sequence
  spacer sequence CTCN PAM
gcccgcagguccccccccuc

SEQ ID NO: 30539 - RNA, 20 nt, Artificial Sequence
  spacer sequence CTCN PAM
agauggcucaggaugcccgc

SEQ ID NO: 30540 - RNA, 20 nt, Artificial Sequence
  spacer sequence CTCN PAM
ggaugcccgcacuuuucuuu

SEQ ID NO: 30541 - RNA, 20 nt, Artificial Sequence
  spacer sequence CTCN PAM
ugucccaagaacaaagaaaa

SEQ ID NO: 30542 - RNA, 20 nt, Artificial Sequence
  spacer sequence CTCN PAM
ccgaucccuccugucccaag

SEQ ID NO: 30543 - RNA, 20 nt, Artificial Sequence
  spacer sequence CTCN PAM
gguccugggaagccccccgg

SEQ ID NO: 30544 - RNA, 20 nt, Artificial Sequence
  spacer sequence CTCN PAM
caccccgcaccccggggggc

SEQ ID NO: 30545 - RNA, 20 nt, Artificial Sequence
  spacer sequence CTCN PAM
gcgcagccagcgccgcccug

SEQ ID NO: 30546 - RNA, 20 nt, Artificial Sequence
  spacer sequence CTCN PAM
gcccccgccccgccccccgg

SEQ ID NO: 30547 - RNA, 20 nt, Artificial Sequence
  spacer sequence CTCN PAM
cccuucaccgcgggugaccu

SEQ ID NO: 30548 - RNA, 20 nt, Artificial Sequence
  spacer sequence CTCN PAM
guugcccagccacacggucc

SEQ ID NO: 30549 - RNA, 20 nt, Artificial Sequence
  spacer sequence CTCN PAM
cgacuacagucuuucguucc

SEQ ID NO: 30550 - RNA, 20 nt, Artificial Sequence
  spacer sequence CTCN PAM
cccgcgcgcagcccagucgu

SEQ ID NO: 30551 - RNA, 20 nt, Artificial Sequence
  spacer sequence CTCN PAM
ccugccaggggcagcgcggc

SEQ ID NO: 30552 - RNA, 20 nt, Artificial Sequence
  spacer sequence CTCN PAM
ccgggacuccgggcggcgcu

SEQ ID NO: 30553 - RNA, 20 nt, Artificial Sequence
  spacer sequence CTCN PAM
gggcggcgcucccaggcggg

SEQ ID NO: 30554 - RNA, 20 nt, Artificial Sequence
  spacer sequence CTCN PAM
caggcgggcccggcagaggg

SEQ ID NO: 30555 - RNA, 20 nt, Artificial Sequence
  spacer sequence CTCN PAM
gccgggcccgccugggagcg

SEQ ID NO: 30556 - RNA, 20 nt, Artificial Sequence
  spacer sequence CTCN PAM
ggcgcgcccucugccgggcc

SEQ ID NO: 30557 - RNA, 20 nt, Artificial Sequence
  spacer sequence CTCN PAM
ccgcauccccgagcgcgcgc

SEQ ID NO: 30558 - RNA, 20 nt, Artificial Sequence
  spacer sequence CTCN PAM
gggaugcggugagucagcag

SEQ ID NO: 30559 - RNA, 20 nt, Artificial Sequence
  spacer sequence CTCN PAM
agcgggcgcgccucggggaa

SEQ ID NO: 30560 - RNA, 20 nt, Artificial Sequence
  spacer sequence CTCN PAM
agccgugacgugacgcggcg

SEQ ID NO: 30561 - RNA, 20 nt, Artificial Sequence
  spacer sequence CTCN PAM
gggaaacggguucugcccgc

SEQ ID NO: 30562 - RNA, 20 nt, Artificial Sequence
  spacer sequence CTCN PAM
gugacguggccggguggcug

SEQ ID NO: 30563 - RNA, 20 nt, Artificial Sequence
  spacer sequence CTCN PAM
gcccccacgcaccacgcccu

SEQ ID NO: 30564 - RNA, 20 nt, Artificial Sequence
  spacer sequence CTCN PAM
ccggggccgcggcccuagcc

SEQ ID NO: 30565 - RNA, 20 nt, Artificial Sequence
  spacer sequence CTCN PAM
ccgucgcccgcccgccccgg

SEQ ID NO: 30566 - RNA, 20 nt, Artificial Sequence
  spacer sequence CTCN PAM
uggccggggucccggggcgg

SEQ ID NO: 30567 - RNA, 20 nt, Artificial Sequence
  spacer sequence CTCN PAM
cgcuuccgcucgcggcuuuu

SEQ ID NO: 30568 - RNA, 20 nt, Artificial Sequence
  spacer sequence CTCN PAM
cggcuuuucccggacgaagg

SEQ ID NO: 30569 - RNA, 20 nt, Artificial Sequence
  spacer sequence CTCN PAM
cggcgccgggaacaauggcc

SEQ ID NO: 30570 - RNA, 20 nt, Artificial Sequence
  spacer sequence CTCN PAM
cgcucccggccgcucccuug

SEQ ID NO: 30571 - RNA, 20 nt, Artificial Sequence
  spacer sequence CTCN PAM
cggccgcucccuugggaucg

SEQ ID NO: 30572 - RNA, 20 nt, Artificial Sequence
  spacer sequence CTCN PAM
cuugggaucgcgagggguac

SEQ ID NO: 30573 - RNA, 20 nt, Artificial Sequence
  spacer sequence CTCN PAM
cgaucccaagggagcggccg

SEQ ID NO: 30574 - RNA, 20 nt, Artificial Sequence
  spacer sequence CTCN PAM
agaccugggucccgcgcccc

SEQ ID NO: 30575 - RNA, 20 nt, Artificial Sequence
  spacer sequence CTCN PAM
gggcgcuuaugaauggcugc

SEQ ID NO: 30576 - RNA, 20 nt, Artificial Sequence
  spacer sequence CTCN PAM
gcgcccgcccccgccccgcc

SEQ ID NO: 30577 - RNA, 20 nt, Artificial Sequence
  spacer sequence CTCN PAM
ccgcgcccgcccccgccccg

SEQ ID NO: 30578 - RNA, 20 nt, Artificial Sequence
  spacer sequence CTCN PAM
ccuuggucgccugggcgcug

SEQ ID NO: 30579 - RNA, 20 nt, Artificial Sequence
  spacer sequence CTCN PAM
ccccgcccccagcgcccagg

SEQ ID NO: 30580 - RNA, 20 nt, Artificial Sequence
  spacer sequence CTCN PAM
cauaggcccgggcucgcggc

SEQ ID NO: 30581 - RNA, 20 nt, Artificial Sequence
  spacer sequence CTCN PAM
uaggcccgggcucgcggccg

SEQ ID NO: 30582 - RNA, 20 nt, Artificial Sequence
  spacer sequence CTCN PAM
cggccgacugggcgcucggc

SEQ ID NO: 30583 - RNA, 20 nt, Artificial Sequence
  spacer sequence CTCN PAM
gcgcgcggcgauuggccggc

SEQ ID NO: 30584 - RNA, 20 nt, Artificial Sequence
  spacer sequence CTCN PAM
gccggccgggcgccggccaa

SEQ ID NO: 30585 - RNA, 20 nt, Artificial Sequence
  spacer sequence CTCN PAM
cauucacuacuuacuccgcc

SEQ ID NO: 30586 - RNA, 20 nt, Artificial Sequence
  spacer sequence CTCN PAM
gagcggcggcgacggcuguu

SEQ ID NO: 30587 - RNA, 20 nt, Artificial Sequence
  spacer sequence CTCN PAM
gaggaucugggggugaaagu

SEQ ID NO: 30588 - RNA, 20 nt, Artificial Sequence
  spacer sequence CTCN PAM
cuuagcaacagccgucgccg

SEQ ID NO: 30589 - RNA, 20 nt, Artificial Sequence
  spacer sequence CTCN PAM
cgcguccccucccuuagcaa

SEQ ID NO: 30590 - RNA, 20 nt, Artificial Sequence
  spacer sequence CTCN PAM
gcugguggcgcugggugccg

SEQ ID NO: 30591 - RNA, 20 nt, Artificial Sequence
  spacer sequence CTCN PAM
ccaggacccuuaaccgcgcc

SEQ ID NO: 30592 - RNA, 20 nt, Artificial Sequence
  spacer sequence CTCN PAM
uucaaagggcggcgggcgcg

SEQ ID NO: 30593 - RNA, 20 nt, Artificial Sequence
  spacer sequence CTCN PAM
ugggggcgccuuccgggggu

SEQ ID NO: 30594 - RNA, 20 nt, Artificial Sequence
  spacer sequence CTCN PAM
ggcuccugggggcgccuucc

SEQ ID NO: 30595 - RNA, 20 nt, Artificial Sequence
  spacer sequence CTCN PAM
gagcgccacucggauuuugg

SEQ ID NO: 30596 - RNA, 20 nt, Artificial Sequence
  spacer sequence CTCN PAM
gaggucgcuccggcuccugg

SEQ ID NO: 30597 - RNA, 20 nt, Artificial Sequence
  spacer sequence CTCN PAM
gauuuuggauuucggucucg

SEQ ID NO: 30598 - RNA, 20 nt, Artificial Sequence
  spacer sequence CTCN PAM
cauuccgcggccgggacuuu

SEQ ID NO: 30599 - RNA, 20 nt, Artificial Sequence
  spacer sequence CTCN PAM
aggaggacgcgcgcugcucc

SEQ ID NO: 30600 - RNA, 20 nt, Artificial Sequence
  spacer sequence CTCN PAM
agaaagucccggccgcggaa

SEQ ID NO: 30601 - RNA, 20 nt, Artificial Sequence
  spacer sequence CTCN PAM
ucgagaaagucccggccgcg

SEQ ID NO: 30602 - RNA, 20 nt, Artificial Sequence
  spacer sequence CTCN PAM
gcgcccccgagugcccggag

SEQ ID NO: 30603 - RNA, 20 nt, Artificial Sequence
  spacer sequence CTCN PAM
ggggcgcggagcagcgcgcg

SEQ ID NO: 30604 - RNA, 20 nt, Artificial Sequence
  spacer sequence CTCN PAM
gggcacucgggggcgcggag

SEQ ID NO: 30605 - RNA, 20 nt, Artificial Sequence
  spacer sequence CTCN PAM
ccggaugccggguccuccgg

SEQ ID NO: 30606 - RNA, 20 nt, Artificial Sequence
  spacer sequence CTCN PAM
cgccccugucccggaggcgc

SEQ ID NO: 30607 - RNA, 20 nt, Artificial Sequence
  spacer sequence CTCN PAM
ccccugucccggaggcgcgg

SEQ ID NO: 30608 - RNA, 20 nt, Artificial Sequence
  spacer sequence CTCN PAM
gggacaggggcgagaggcuc

SEQ ID NO: 30609 - RNA, 20 nt, Artificial Sequence
  spacer sequence CTCN PAM
ccgcgccuccgggacagggg

SEQ ID NO: 30610 - RNA, 20 nt, Artificial Sequence
  spacer sequence CTCN PAM
auccccggcgcgcgcugggg

SEQ ID NO: 30611 - RNA, 20 nt, Artificial Sequence
  spacer sequence CTCN PAM
gggcgccgccgggcugcggc

SEQ ID NO: 30612 - RNA, 20 nt, Artificial Sequence
  spacer sequence CTCN PAM
caggcgccgccgggggcccc

SEQ ID NO: 30613 - RNA, 20 nt, Artificial Sequence
  spacer sequence CTCN PAM
gccgccgggcccagcucgca

SEQ ID NO: 30614 - RNA, 20 nt, Artificial Sequence
  spacer sequence CTCN PAM
ugggcgccgccucggccgcc

SEQ ID NO: 30615 - RNA, 20 nt, Artificial Sequence
  spacer sequence CTCN PAM
ccauccacagcaccacgggc

SEQ ID NO: 30616 - RNA, 20 nt, Artificial Sequence
  spacer sequence CTCN PAM
ucgggcggcacggccagguc

SEQ ID NO: 30617 - RNA, 20 nt, Artificial Sequence
  spacer sequence CTCN PAM
accgucucgucgggcggcac

SEQ ID NO: 30618 - RNA, 20 nt, Artificial Sequence
  spacer sequence CTCN PAM
aagugcccaaggagcgccug

SEQ ID NO: 30619 - RNA, 20 nt, Artificial Sequence
  spacer sequence CTCN PAM
uugggcacuuugaggcgcug

SEQ ID NO: 30620 - RNA, 20 nt, Artificial Sequence
  spacer sequence CTCN PAM
ucuccacaaagacacguagg

SEQ ID NO: 30621 - RNA, 20 nt, Artificial Sequence
  spacer sequence CTCN PAM
acaaagacacguagguaccg

SEQ ID NO: 30622 - RNA, 20 nt, Artificial Sequence
  spacer sequence CTCN PAM
ggccccggcccccgggcggg

SEQ ID NO: 30623 - RNA, 20 nt, Artificial Sequence
  spacer sequence CTCN PAM
uuguucccgcccgggggccg

SEQ ID NO: 30624 - RNA, 20 nt, Artificial Sequence
  spacer sequence CTCN PAM
cgggcgcccucugcucggcc

SEQ ID NO: 30625 - RNA, 20 nt, Artificial Sequence
  spacer sequence CTCN PAM
ggcgcccucugcucggccuc

SEQ ID NO: 30626 - RNA, 20 nt, Artificial Sequence
  spacer sequence CTCN PAM
gcucggccucgccugccucg

SEQ ID NO: 30627 - RNA, 20 nt, Artificial Sequence
  spacer sequence CTCN PAM
gccucgccugccucggcccc

SEQ ID NO: 30628 - RNA, 20 nt, Artificial Sequence
  spacer sequence CTCN PAM
ccugccucggcccccucccc

SEQ ID NO: 30629 - RNA, 20 nt, Artificial Sequence
  spacer sequence CTCN PAM
gcccccucccccgcccgggg

SEQ ID NO: 30630 - RNA, 20 nt, Artificial Sequence
  spacer sequence CTCN PAM
cccgcccggggucgccgcac

SEQ ID NO: 30631 - RNA, 20 nt, Artificial Sequence
  spacer sequence CTCN PAM
cagccgccuuugugcggcga

SEQ ID NO: 30632 - RNA, 20 nt, Artificial Sequence
  spacer sequence CTCN PAM
cgccugcguccgcgccggcu

SEQ ID NO: 30633 - RNA, 20 nt, Artificial Sequence
  spacer sequence CTCN PAM
gcggccuccucugcgucugg

SEQ ID NO: 30634 - RNA, 20 nt, Artificial Sequence
  spacer sequence CTCN PAM
ucugcgucuggcugucuccc

SEQ ID NO: 30635 - RNA, 20 nt, Artificial Sequence
  spacer sequence CTCN PAM
gcgucuggcugucucccccc

SEQ ID NO: 30636 - RNA, 20 nt, Artificial Sequence
  spacer sequence CTCN PAM
ccccacuugcgucucucucc

SEQ ID NO: 30637 - RNA, 20 nt, Artificial Sequence
  spacer sequence CTCN PAM
cucccccccuuuguucucgc

SEQ ID NO: 30638 - RNA, 20 nt, Artificial Sequence
  spacer sequence CTCN PAM
cccccccuuuguucucgccu

SEQ ID NO: 30639 - RNA, 20 nt, Artificial Sequence
  spacer sequence CTCN PAM
cccccuuuguucucgccucc

SEQ ID NO: 30640 - RNA, 20 nt, Artificial Sequence
  spacer sequence CTCN PAM
ccuccgagcgcuccccgcag

SEQ ID NO: 30641 - RNA, 20 nt, Artificial Sequence
  spacer sequence CTCN PAM
gagcgcuccccgcagccucc

SEQ ID NO: 30642 - RNA, 20 nt, Artificial Sequence
  spacer sequence CTCN PAM
gaggcgagaacaaagggggg

SEQ ID NO: 30643 - RNA, 20 nt, Artificial Sequence
  spacer sequence CTCN PAM
ccgcagccuccccucccccc

SEQ ID NO: 30644 - RNA, 20 nt, Artificial Sequence
  spacer sequence CTCN PAM
ccuccccccugguauuuaaa

SEQ ID NO: 30645 - RNA, 20 nt, Artificial Sequence
  spacer sequence CTCN PAM
ccccugguauuuaaaucgcc

SEQ ID NO: 30646 - RNA, 20 nt, Artificial Sequence
  spacer sequence CTCN PAM
gggccugcaggcgauuuaaa

SEQ ID NO: 30647 - RNA, 20 nt, Artificial Sequence
  spacer sequence CTCN PAM
ccccgcgggccuccggggac

SEQ ID NO: 30648 - RNA, 20 nt, Artificial Sequence
  spacer sequence CTCN PAM
ggggacacgcaguguccauc

SEQ ID NO: 30649 - RNA, 20 nt, Artificial Sequence
  spacer sequence CTCN PAM
acugggauggacacugcgug

SEQ ID NO: 30650 - RNA, 20 nt, Artificial Sequence
  spacer sequence CTCN PAM
cccgaugggccccuccacug

SEQ ID NO: 30651 - RNA, 20 nt, Artificial Sequence
  spacer sequence CTCN PAM
gccccucccccgaugggccc

SEQ ID NO: 30652 - RNA, 20 nt, Artificial Sequence
  spacer sequence CTCN PAM
cccuccgccccucccccgau

SEQ ID NO: 30653 - RNA, 20 nt, Artificial Sequence
  spacer sequence CTCN PAM
uuugucugcgcggcggcggc

SEQ ID NO: 30654 - RNA, 20 nt, Artificial Sequence
  spacer sequence CTCN PAM
ccggcgcaggcggccgccgc

SEQ ID NO: 30655 - RNA, 20 nt, Artificial Sequence
  spacer sequence CTCN PAM
cuccccggcgcaggcggccg

SEQ ID NO: 30656 - RNA, 20 nt, Artificial Sequence
  spacer sequence CTCN PAM
ucccuccccggcgcaggcgg

SEQ ID NO: 30657 - RNA, 20 nt, Artificial Sequence
  spacer sequence CTCN PAM
uccucccuccccggcgcagg

SEQ ID NO: 30658 - RNA, 20 nt, Artificial Sequence
  spacer sequence CTCN PAM
cccuccuccucccuccccgg

SEQ ID NO: 30659 - RNA, 20 nt, Artificial Sequence
  spacer sequence CTCN PAM
ccucgggccgaaacccgugg

SEQ ID NO: 30660 - RNA, 20 nt, Artificial Sequence
  spacer sequence CTCN PAM
ucgggccgaaacccgugguu

SEQ ID NO: 30661 - RNA, 20 nt, Artificial Sequence
  spacer sequence CTCN PAM
ggccgaaacccgugguuccu

SEQ ID NO: 30662 - RNA, 20 nt, Artificial Sequence
  spacer sequence CTCN PAM
uuguaggaaccacggguuuc

SEQ ID NO: 30663 - RNA, 20 nt, Artificial Sequence
  spacer sequence CTCN PAM
ucuuuguaggaaccacgggu

SEQ ID NO: 30664 - RNA, 20 nt, Artificial Sequence
  spacer sequence CTCN PAM
augccaccuucccccacgac

SEQ ID NO: 30665 - RNA, 20 nt, Artificial Sequence
  spacer sequence CTCN PAM
gggccccagugugcucuaug

SEQ ID NO: 30666 - RNA, 20 nt, Artificial Sequence
  spacer sequence CTCN PAM
ucugggccccagugugcucu

SEQ ID NO: 30667 - RNA, 20 nt, Artificial Sequence
  spacer sequence CTCN PAM
uccucugggccccagugugc

SEQ ID NO: 30668 - RNA, 20 nt, Artificial Sequence
  spacer sequence CTCN PAM
gcaccccaaccaggcacuuu

SEQ ID NO: 30669 - RNA, 20 nt, Artificial Sequence
  spacer sequence CTCN PAM
ggcacccccucugcacccca

SEQ ID NO: 30670 - RNA, 20 nt, Artificial Sequence
  spacer sequence CTCN PAM
aguggaacccccgcccugga

SEQ ID NO: 30671 - RNA, 20 nt, Artificial Sequence
  spacer sequence CTCN PAM
cagcaccagacggagaccuc

SEQ ID NO: 30672 - RNA, 20 nt, Artificial Sequence
  spacer sequence CTCN PAM
gucuggugcugggagcccca

SEQ ID NO: 30673 - RNA, 20 nt, Artificial Sequence
  spacer sequence CTCN PAM
cugcacgcgcuuagggcccu

SEQ ID NO: 30674 - RNA, 20 nt, Artificial Sequence
  spacer sequence CTCN PAM
gcacgcgcuuagggcccugg

SEQ ID NO: 30675 - RNA, 20 nt, Artificial Sequence
  spacer sequence CTCN PAM
ccccacacaagcacagcccu

SEQ ID NO: 30676 - RNA, 20 nt, Artificial Sequence
  spacer sequence CTCN PAM
ccacacaagcacagcccucc

SEQ ID NO: 30677 - RNA, 20 nt, Artificial Sequence
  spacer sequence CTCN PAM
cccgcggccucugcuuccgc

SEQ ID NO: 30678 - RNA, 20 nt, Artificial Sequence
  spacer sequence CTCN PAM
gcuuccgcgucccugugucg

SEQ ID NO: 30679 - RNA, 20 nt, Artificial Sequence
  spacer sequence CTCN PAM
gcggagucucaugcucuucc

SEQ ID NO: 30680 - RNA, 20 nt, Artificial Sequence
  spacer sequence CTCN PAM
gcggagacgacacagggacg

SEQ ID NO: 30681 - RNA, 20 nt, Artificial Sequence
  spacer sequence CTCN PAM
ugcucuuccuuccucccccc

SEQ ID NO: 30682 - RNA, 20 nt, Artificial Sequence
  spacer sequence CTCN PAM
uccuuccuccccccagccgg

SEQ ID NO: 30683 - RNA, 20 nt, Artificial Sequence
  spacer sequence CTCN PAM
ccccagccggcucaguucgg

SEQ ID NO: 30684 - RNA, 20 nt, Artificial Sequence
  spacer sequence CTCN PAM
guucggggaagcugcaggag

SEQ ID NO: 30685 - RNA, 20 nt, Artificial Sequence
  spacer sequence CTCN PAM
ugcagcuuccccgaacugag

SEQ ID NO: 30686 - RNA, 20 nt, Artificial Sequence
  spacer sequence CTCN PAM
ugguaaauggccauggggcu

SEQ ID NO: 30687 - RNA, 20 nt, Artificial Sequence
  spacer sequence CTCN PAM
gggggcacgcagccccaugg

SEQ ID NO: 30688 - RNA, 20 nt, Artificial Sequence
  spacer sequence CTCN PAM
cucgguaccuguccgcacac

SEQ ID NO: 30689 - RNA, 20 nt, Artificial Sequence
  spacer sequence CTCN PAM
guaccuguccgcacacacac

SEQ ID NO: 30690 - RNA, 20 nt, Artificial Sequence
  spacer sequence CTCN PAM
ccacccccuauuccagccca

SEQ ID NO: 30691 - RNA, 20 nt, Artificial Sequence
  spacer sequence CTCN PAM
acccccuauuccagcccagg

SEQ ID NO: 30692 - RNA, 20 nt, Artificial Sequence
  spacer sequence CTCN PAM
ggccccucuccucccucucu

SEQ ID NO: 30693 - RNA, 20 nt, Artificial Sequence
  spacer sequence CTCN PAM
ccucccucucuuuguagucu

SEQ ID NO: 30694 - RNA, 20 nt, Artificial Sequence
  spacer sequence CTCN PAM
ucccucucuuuguagucuca

SEQ ID NO: 30695 - RNA, 20 nt, Artificial Sequence
  spacer sequence CTCN PAM
cucucuuuguagucucaggc

SEQ ID NO: 30696 - RNA, 20 nt, Artificial Sequence
  spacer sequence CTCN PAM
cuuuguagucucaggccuca

SEQ ID NO: 30697 - RNA, 20 nt, Artificial Sequence
  spacer sequence CTCN PAM
uuguagucucaggccucaag

SEQ ID NO: 30698 - RNA, 20 nt, Artificial Sequence
  spacer sequence CTCN PAM
ggccucaaggccggaacagu

SEQ ID NO: 30699 - RNA, 20 nt, Artificial Sequence
  spacer sequence CTCN PAM
aggccggaacaguccgugau

SEQ ID NO: 30700 - RNA, 20 nt, Artificial Sequence
  spacer sequence CTCN PAM
cgagagucucacggagacgc

SEQ ID NO: 30701 - RNA, 20 nt, Artificial Sequence
  spacer sequence CTCN PAM
agagucucacggagacgcag

SEQ ID NO: 30702 - RNA, 20 nt, Artificial Sequence
  spacer sequence CTCN PAM
agagcuugcaucacggacug

SEQ ID NO: 30703 - RNA, 20 nt, Artificial Sequence
  spacer sequence CTCN PAM
cgagagcuugcaucacggac

SEQ ID NO: 30704 - RNA, 20 nt, Artificial Sequence
  spacer sequence CTCN PAM
cggagacgcagguaagaccu

SEQ ID NO: 30705 - RNA, 20 nt, Artificial Sequence
  spacer sequence CTCN PAM
gugagacucucgagagcuug

SEQ ID NO: 30706 - RNA, 20 nt, Artificial Sequence
  spacer sequence CTCN PAM
ccagccccuuccuaacaggg

SEQ ID NO: 30707 - RNA, 20 nt, Artificial Sequence
  spacer sequence CTCN PAM
cagggcugcccuguuaggaa

SEQ ID NO: 30708 - RNA, 20 nt, Artificial Sequence
  spacer sequence CTCN PAM
caggaggcugggggagggga

SEQ ID NO: 30709 - RNA, 20 nt, Artificial Sequence
  spacer sequence CTCN PAM
ugggagcacagacaaccccc

SEQ ID NO: 30710 - RNA, 20 nt, Artificial Sequence
  spacer sequence CTCN PAM
cccagccuccugggagcaca

SEQ ID NO: 30711 - RNA, 20 nt, Artificial Sequence
  spacer sequence CTCN PAM
ccucccccagccuccuggga

SEQ ID NO: 30712 - RNA, 20 nt, Artificial Sequence
  spacer sequence CTCN PAM
ccaccuccucucccccaaga

SEQ ID NO: 30713 - RNA, 20 nt, Artificial Sequence
  spacer sequence CTCN PAM
ucucccccaagauucaccac

SEQ ID NO: 30714 - RNA, 20 nt, Artificial Sequence
  spacer sequence CTCN PAM
cccccaagauucaccaccug

SEQ ID NO: 30715 - RNA, 20 nt, Artificial Sequence
  spacer sequence CTCN PAM
cccaagauucaccaccugac

SEQ ID NO: 30716 - RNA, 20 nt, Artificial Sequence
  spacer sequence CTCN PAM
gggucagguggugaaucuug

SEQ ID NO: 30717 - RNA, 20 nt, Artificial Sequence
  spacer sequence CTCN PAM
cccacgguggcugcccuggg

SEQ ID NO: 30718 - RNA, 20 nt, Artificial Sequence
  spacer sequence CTCN PAM
cacgguggcugcccuggggg

SEQ ID NO: 30719 - RNA, 20 nt, Artificial Sequence
  spacer sequence CTCN PAM
uccccgcucacacccuggcc

SEQ ID NO: 30720 - RNA, 20 nt, Artificial Sequence
  spacer sequence CTCN PAM
cacccuggccugcaucccca

SEQ ID NO: 30721 - RNA, 20 nt, Artificial Sequence
  spacer sequence CTCN PAM
gcccccaccgaggagccccc

SEQ ID NO: 30722 - RNA, 20 nt, Artificial Sequence
  spacer sequence CTCN PAM
gugggggcggagggggcugg

SEQ ID NO: 30723 - RNA, 20 nt, Artificial Sequence
  spacer sequence CTCN PAM
ucggugggggcggagggggc

SEQ ID NO: 30724 - RNA, 20 nt, Artificial Sequence
  spacer sequence CTCN PAM
agccgcuguggcuuccccag

SEQ ID NO: 30725 - RNA, 20 nt, Artificial Sequence
  spacer sequence CTCN PAM
ggggaagccacagcggcugg

SEQ ID NO: 30726 - RNA, 20 nt, Artificial Sequence
  spacer sequence CTCN PAM
cucuggggaagccacagcgg

SEQ ID NO: 30727 - RNA, 20 nt, Artificial Sequence
  spacer sequence CTCN PAM
uuuuuuacauuucugcugag

SEQ ID NO: 30728 - RNA, 20 nt, Artificial Sequence
  spacer sequence CTCN PAM
gcagaaauguaaaaaaggag

SEQ ID NO: 30729 - RNA, 20 nt, Artificial Sequence
  spacer sequence CTCN PAM
uuccgccuuccgugaccccc

SEQ ID NO: 30730 - RNA, 20 nt, Artificial Sequence
  spacer sequence CTCN PAM
cgaugggggucacggaaggc

SEQ ID NO: 30731 - RNA, 20 nt, Artificial Sequence
  spacer sequence CTCN PAM
cacgaugggggucacggaag

SEQ ID NO: 30732 - RNA, 20 nt, Artificial Sequence
  spacer sequence CTCN PAM
ucacccuccccuccucucuc

SEQ ID NO: 30733 - RNA, 20 nt, Artificial Sequence
  spacer sequence CTCN PAM
ccuccucucucuggccuuug

SEQ ID NO: 30734 - RNA, 20 nt, Artificial Sequence
  spacer sequence CTCN PAM
ucucucuggccuuuguucuc

SEQ ID NO: 30735 - RNA, 20 nt, Artificial Sequence
  spacer sequence CTCN PAM
cucuggccuuuguucucuac

SEQ ID NO: 30736 - RNA, 20 nt, Artificial Sequence
  spacer sequence CTCN PAM
cuggccuuuguucucuaccc

SEQ ID NO: 30737 - RNA, 20 nt, Artificial Sequence
  spacer sequence CTCN PAM
ggccuuuguucucuaccccg

SEQ ID NO: 30738 - RNA, 20 nt, Artificial Sequence
  spacer sequence CTCN PAM
accccgaaaggggagggggc

SEQ ID NO: 30739 - RNA, 20 nt, Artificial Sequence
  spacer sequence CTCN PAM
ccuuucgggguagagaacaa

SEQ ID NO: 30740 - RNA, 20 nt, Artificial Sequence
  spacer sequence CTCN PAM
cuggccccagggcugggcac

SEQ ID NO: 30741 - RNA, 20 nt, Artificial Sequence
  spacer sequence CTCN PAM
uggccgcuuacuaaauauuu

SEQ ID NO: 30742 - RNA, 20 nt, Artificial Sequence
  spacer sequence CTCN PAM
cuccuggccgcuuacuaaau

SEQ ID NO: 30743 - RNA, 20 nt, Artificial Sequence
  spacer sequence CTCN PAM
cccgguucccgguuuugcug

SEQ ID NO: 30744 - RNA, 20 nt, Artificial Sequence
  spacer sequence CTCN PAM
uucuuuccucauuuucuugg

SEQ ID NO: 30745 - RNA, 20 nt, Artificial Sequence
  spacer sequence CTCN PAM
uuuucuuggcugcggccaag

SEQ ID NO: 30746 - RNA, 20 nt, Artificial Sequence
  spacer sequence CTCN PAM
gacaagggcccuggccaccu

SEQ ID NO: 30747 - RNA, 20 nt, Artificial Sequence
  spacer sequence CTCN PAM
caggagggugacacaggccu

SEQ ID NO: 30748 - RNA, 20 nt, Artificial Sequence
  spacer sequence CTCN PAM
ugggagguggccagggcccu

SEQ ID NO: 30749 - RNA, 20 nt, Artificial Sequence
  spacer sequence CTCN PAM
gcaauccgcccgcugccagg

SEQ ID NO: 30750 - RNA, 20 nt, Artificial Sequence
  spacer sequence CTCN PAM
cuggccccgaggcccgcacc

SEQ ID NO: 30751 - RNA, 20 nt, Artificial Sequence
  spacer sequence CTCN PAM
gggccagggaggcccgggaa

SEQ ID NO: 30752 - RNA, 20 nt, Artificial Sequence
  spacer sequence CTCN PAM
acaugccgcugggaaagcgg

SEQ ID NO: 30753 - RNA, 20 nt, Artificial Sequence
  spacer sequence CTCN PAM
cggcccccgcccugcccccg

SEQ ID NO: 30754 - RNA, 20 nt, Artificial Sequence
  spacer sequence CTCN PAM
gcccccacgccacugcugcu

SEQ ID NO: 30755 - RNA, 20 nt, Artificial Sequence
  spacer sequence CTCN PAM
ggaccccggcucugccccca

SEQ ID NO: 30756 - RNA, 20 nt, Artificial Sequence
  spacer sequence CTCN PAM
ccccaggaaaucaccugcag

SEQ ID NO: 30757 - RNA, 20 nt, Artificial Sequence
  spacer sequence CTCN PAM
cacucgccccaggaaaucac

SEQ ID NO: 30758 - RNA, 20 nt, Artificial Sequence
  spacer sequence CTCN PAM
gcucacacucgccccaggaa

SEQ ID NO: 30759 - RNA, 20 nt, Artificial Sequence
  spacer sequence CTCN PAM
ccgccgcuggggggcugcgg

SEQ ID NO: 30760 - RNA, 20 nt, Artificial Sequence
  spacer sequence CTCN PAM
ucccugggcgccugcgucag

SEQ ID NO: 30761 - RNA, 20 nt, Artificial Sequence
  spacer sequence CTCN PAM
cugggcgccugcgucaggaa

SEQ ID NO: 30762 - RNA, 20 nt, Artificial Sequence
  spacer sequence CTCN PAM
uuccugacgcaggcgcccag

SEQ ID NO: 30763 - RNA, 20 nt, Artificial Sequence
  spacer sequence CTCN PAM
agccccccccaacccagcuc

SEQ ID NO: 30764 - RNA, 20 nt, Artificial Sequence
  spacer sequence CTCN PAM
gcccagcacccccuccagcc

SEQ ID NO: 30765 - RNA, 20 nt, Artificial Sequence
  spacer sequence CTCN PAM
ccaggguugcuucccugccu

SEQ ID NO: 30766 - RNA, 20 nt, Artificial Sequence
  spacer sequence CTCN PAM
gugccaggcagggaagcaac

SEQ ID NO: 30767 - RNA, 20 nt, Artificial Sequence
  spacer sequence CTCN PAM
cuggggaaggcuaaugggcg

SEQ ID NO: 30768 - RNA, 20 nt, Artificial Sequence
  spacer sequence CTCN PAM
agcugcucucgggaagccac

SEQ ID NO: 30769 - RNA, 20 nt, Artificial Sequence
  spacer sequence CTCN PAM
cgggaagccaccccgggccc

SEQ ID NO: 30770 - RNA, 20 nt, Artificial Sequence
  spacer sequence CTCN PAM
ggaagccaccccgggcccuu

SEQ ID NO: 30771 - RNA, 20 nt, Artificial Sequence
  spacer sequence CTCN PAM
ucccugccucccuccccaug

SEQ ID NO: 30772 - RNA, 20 nt, Artificial Sequence
  spacer sequence CTCN PAM
cugccucccuccccaugggc

SEQ ID NO: 30773 - RNA, 20 nt, Artificial Sequence
  spacer sequence CTCN PAM
cuccccaugggccccaagca

SEQ ID NO: 30774 - RNA, 20 nt, Artificial Sequence
  spacer sequence CTCN PAM
ccaugggccccaagcagaga

SEQ ID NO: 30775 - RNA, 20 nt, Artificial Sequence
  spacer sequence CTCN PAM
gcuuggggcccauggggagg

SEQ ID NO: 30776 - RNA, 20 nt, Artificial Sequence
  spacer sequence CTCN PAM
acuggcaguagcuggcguaa

SEQ ID NO: 30777 - RNA, 20 nt, Artificial Sequence
  spacer sequence CTCN PAM
ccacuggcaguagcuggcgu

SEQ ID NO: 30778 - RNA, 20 nt, Artificial Sequence
  spacer sequence CTCN PAM
ucuccacuggcaguagcugg

SEQ ID NO: 30779 - RNA, 20 nt, Artificial Sequence
  spacer sequence CTCN PAM
ccucuccacuggcaguagcu

SEQ ID NO: 30780 - RNA, 20 nt, Artificial Sequence
  spacer sequence CTCN PAM
cggcucuccucuccacuggc

SEQ ID NO: 30781 - RNA, 20 nt, Artificial Sequence
  spacer sequence CTCN PAM
cucccggcucuccucuccac

SEQ ID NO: 30782 - RNA, 20 nt, Artificial Sequence
  spacer sequence CTCN PAM
cccucccggcucuccucucc

SEQ ID NO: 30783 - RNA, 20 nt, Artificial Sequence
  spacer sequence CTCN PAM
cagcucucccucccggcucu

SEQ ID NO: 30784 - RNA, 20 nt, Artificial Sequence
  spacer sequence CTCN PAM
gaaccgaccgccucccagcu

SEQ ID NO: 30785 - RNA, 20 nt, Artificial Sequence
  spacer sequence CTCN PAM
gaaaccuccgccaccccccc

SEQ ID NO: 30786 - RNA, 20 nt, Artificial Sequence
  spacer sequence CTCN PAM
gccacccccccccccauccc

SEQ ID NO: 30787 - RNA, 20 nt, Artificial Sequence
  spacer sequence CTCN PAM
ccaguggccgggaugggggg

SEQ ID NO: 30788 - RNA, 20 nt, Artificial Sequence
  spacer sequence CTCN PAM
ccccaguggccgggaugggg

SEQ ID NO: 30789 - RNA, 20 nt, Artificial Sequence
  spacer sequence CTCN PAM
ggcccauacccagagcaggg

SEQ ID NO: 30790 - RNA, 20 nt, Artificial Sequence
  spacer sequence CTCN PAM
ggguaugggccagagcccug

SEQ ID NO: 30791 - RNA, 20 nt, Artificial Sequence
  spacer sequence CTCN PAM
ccaagcccccugcucugggu

SEQ ID NO: 30792 - RNA, 20 nt, Artificial Sequence
  spacer sequence CTCN PAM
cccuguccucgccaagcccc

SEQ ID NO: 30793 - RNA, 20 nt, Artificial Sequence
  spacer sequence CTCN PAM
aucugcccccguucagggug

SEQ ID NO: 30794 - RNA, 20 nt, Artificial Sequence
  spacer sequence CTCN PAM
aagcacagaaacccucaauc

SEQ ID NO: 30795 - RNA, 20 nt, Artificial Sequence
  spacer sequence CTCN PAM
gggacuccagccccagggcg

SEQ ID NO: 30796 - RNA, 20 nt, Artificial Sequence
  spacer sequence CTCN PAM
agccccagggcggucagggc

SEQ ID NO: 30797 - RNA, 20 nt, Artificial Sequence
  spacer sequence CTCN PAM
gccccgcccaggacagauaa

SEQ ID NO: 30798 - RNA, 20 nt, Artificial Sequence
  spacer sequence CTCN PAM
agauaaauauuuaucugucc

SEQ ID NO: 30799 - RNA, 20 nt, Artificial Sequence
  spacer sequence CTCN PAM
cagcuaagucaccagggcca

SEQ ID NO: 30800 - RNA, 20 nt, Artificial Sequence
  spacer sequence CTCN PAM
ggcccccucccagcuaaguc

SEQ ID NO: 30801 - RNA, 20 nt, Artificial Sequence
  spacer sequence CTCN PAM
accucaggcccccucccagc

SEQ ID NO: 30802 - RNA, 20 nt, Artificial Sequence
  spacer sequence CTCN PAM
cguauccacaggcagagagg

SEQ ID NO: 30803 - RNA, 20 nt, Artificial Sequence
  spacer sequence CTCN PAM
gccuguggauacgggagggg

SEQ ID NO: 30804 - RNA, 20 nt, Artificial Sequence
  spacer sequence CTCN PAM
cugccuguggauacgggagg

SEQ ID NO: 30805 - RNA, 20 nt, Artificial Sequence
  spacer sequence CTCN PAM
ugggccccuagauccucucu

SEQ ID NO: 30806 - RNA, 20 nt, Artificial Sequence
  spacer sequence CTCN PAM
aacaaccuucacuuugccuu

SEQ ID NO: 30807 - RNA, 20 nt, Artificial Sequence
  spacer sequence CTCN PAM
ggccucaguuuccccuugca

SEQ ID NO: 30808 - RNA, 20 nt, Artificial Sequence
  spacer sequence CTCN PAM
guuuccccuugcaagaccga

SEQ ID NO: 30809 - RNA, 20 nt, Artificial Sequence
  spacer sequence CTCN PAM
cuggccaacuaggucggucu

SEQ ID NO: 30810 - RNA, 20 nt, Artificial Sequence
  spacer sequence CTCN PAM
guccccacagcccccagcgg

SEQ ID NO: 30811 - RNA, 20 nt, Artificial Sequence
  spacer sequence CTCN PAM
gccagcccggcccggcccgg

SEQ ID NO: 30812 - RNA, 20 nt, Artificial Sequence
  spacer sequence CTCN PAM
uccgccagcccggcccggcc

SEQ ID NO: 30813 - RNA, 20 nt, Artificial Sequence
  spacer sequence CTCN PAM
ggggucccugucggugccac

SEQ ID NO: 30814 - RNA, 20 nt, Artificial Sequence
  spacer sequence CTCN PAM
gggcucuggggucccugucg

SEQ ID NO: 30815 - RNA, 20 nt, Artificial Sequence
  spacer sequence CTCN PAM
cugggcucuggggucccugu

SEQ ID NO: 30816 - RNA, 20 nt, Artificial Sequence
  spacer sequence CTCN PAM
ccgccccucucugggcucug

SEQ ID NO: 30817 - RNA, 20 nt, Artificial Sequence
  spacer sequence CTCN PAM
cgccgccccucucugggcuc

SEQ ID NO: 30818 - RNA, 20 nt, Artificial Sequence
  spacer sequence CTCN PAM
cagcugacggaccgcucucc

SEQ ID NO: 30819 - RNA, 20 nt, Artificial Sequence
  spacer sequence CTCN PAM
ccuugcaggucagugacuuc

SEQ ID NO: 30820 - RNA, 20 nt, Artificial Sequence
  spacer sequence CTCN PAM
uugcaggucagugacuuccu

SEQ ID NO: 30821 - RNA, 20 nt, Artificial Sequence
  spacer sequence CTCN PAM
cggcccagcacgcuccacug

SEQ ID NO: 30822 - RNA, 20 nt, Artificial Sequence
  spacer sequence CTCN PAM
acugcaacaccgccaugugc

SEQ ID NO: 30823 - RNA, 20 nt, Artificial Sequence
  spacer sequence CTCN PAM
cccguguccucgcccugccg

SEQ ID NO: 30824 - RNA, 20 nt, Artificial Sequence
  spacer sequence CTCN PAM
cccugccggccgguguccag

SEQ ID NO: 30825 - RNA, 20 nt, Artificial Sequence
  spacer sequence CTCN PAM
ggcggcacuggacaccggcc

SEQ ID NO: 30826 - RNA, 20 nt, Artificial Sequence
  spacer sequence CTCN PAM
cucgcccaucacagccggcu

SEQ ID NO: 30827 - RNA, 20 nt, Artificial Sequence
  spacer sequence CTCN PAM
cccaucacagccggcuccuu

SEQ ID NO: 30828 - RNA, 20 nt, Artificial Sequence
  spacer sequence CTCN PAM
uuccggucccacgcagccuc

SEQ ID NO: 30829 - RNA, 20 nt, Artificial Sequence
  spacer sequence CTCN PAM
accaccugcccggaggugag

SEQ ID NO: 30830 - RNA, 20 nt, Artificial Sequence
  spacer sequence CTCN PAM
gggcaggugguggaggcugc

SEQ ID NO: 30831 - RNA, 20 nt, Artificial Sequence
  spacer sequence CTCN PAM
ccuccgggcaggugguggag

SEQ ID NO: 30832 - RNA, 20 nt, Artificial Sequence
  spacer sequence CTCN PAM
ccaggacggcccacccuuug

SEQ ID NO: 30833 - RNA, 20 nt, Artificial Sequence
  spacer sequence CTCN PAM
ccaagaccuccccaggacgg

SEQ ID NO: 30834 - RNA, 20 nt, Artificial Sequence
  spacer sequence CTCN PAM
uagucccaggugagucccuu

SEQ ID NO: 30835 - RNA, 20 nt, Artificial Sequence
  spacer sequence CTCN PAM
ccugggacuaagaguccuug

SEQ ID NO: 30836 - RNA, 20 nt, Artificial Sequence
  spacer sequence CTCN PAM
ggcuggugggugauccccca

SEQ ID NO: 30837 - RNA, 20 nt, Artificial Sequence
  spacer sequence CTCN PAM
ggaucuagaaauaccccacc

SEQ ID NO: 30838 - RNA, 20 nt, Artificial Sequence
  spacer sequence CTCN PAM
ugaucuuugacucauggguc

SEQ ID NO: 30839 - RNA, 20 nt, Artificial Sequence
  spacer sequence CTCN PAM
ugggucaucucuguguccug

SEQ ID NO: 30840 - RNA, 20 nt, Artificial Sequence
  spacer sequence CTCN PAM
guguccuggguugguuguga

SEQ ID NO: 30841 - RNA, 20 nt, Artificial Sequence
  spacer sequence CTCN PAM
ugaccuugggcuaguuuauc

SEQ ID NO: 30842 - RNA, 20 nt, Artificial Sequence
  spacer sequence CTCN PAM
aaacccuguguugacagguc

SEQ ID NO: 30843 - RNA, 20 nt, Artificial Sequence
  spacer sequence CTCN PAM
ugaccugggcugguggguga

SEQ ID NO: 30844 - RNA, 20 nt, Artificial Sequence
  spacer sequence CTCN PAM
ggucccuggguugcugguga

SEQ ID NO: 30845 - RNA, 20 nt, Artificial Sequence
  spacer sequence CTCN PAM
ugugccccuuccucccauca

SEQ ID NO: 30846 - RNA, 20 nt, Artificial Sequence
  spacer sequence CTCN PAM
caucagcagauggacugcuc

SEQ ID NO: 30847 - RNA, 20 nt, Artificial Sequence
  spacer sequence CTCN PAM
cccacggccagcagcagugc

SEQ ID NO: 30848 - RNA, 20 nt, Artificial Sequence
  spacer sequence CTCN PAM
cgaaaacccggcgccgucau

SEQ ID NO: 30849 - RNA, 20 nt, Artificial Sequence
  spacer sequence CTCN PAM
augacggcgccggguuuucg

SEQ ID NO: 30850 - RNA, 20 nt, Artificial Sequence
  spacer sequence CTCN PAM
cgaugacggcgccggguuuu

SEQ ID NO: 30851 - RNA, 20 nt, Artificial Sequence
  spacer sequence CTCN PAM
gggaccuucucugguaggug

SEQ ID NO: 30852 - RNA, 20 nt, Artificial Sequence
  spacer sequence CTCN PAM
gguaggugucacagcacaug

SEQ ID NO: 30853 - RNA, 20 nt, Artificial Sequence
  spacer sequence CTCN PAM
cacaugugcugugacaccua

SEQ ID NO: 30854 - RNA, 20 nt, Artificial Sequence
  spacer sequence CTCN PAM
cgugugucccgugacccugu

SEQ ID NO: 30855 - RNA, 20 nt, Artificial Sequence
  spacer sequence CTCN PAM
acauauucugggcauacaca

SEQ ID NO: 30856 - RNA, 20 nt, Artificial Sequence
  spacer sequence CTCN PAM
cuucacaugucccccaggaa

SEQ ID NO: 30857 - RNA, 20 nt, Artificial Sequence
  spacer sequence CTCN PAM
cgccccguggucccucgugc

SEQ ID NO: 30858 - RNA, 20 nt, Artificial Sequence
  spacer sequence CTCN PAM
ugcacaucagcccacauguc

SEQ ID NO: 30859 - RNA, 20 nt, Artificial Sequence
  spacer sequence CTCN PAM
ggcaauggcguggacaugug

SEQ ID NO: 30860 - RNA, 20 nt, Artificial Sequence
  spacer sequence CTCN PAM
ugagcucacacccguggacg

SEQ ID NO: 30861 - RNA, 20 nt, Artificial Sequence
  spacer sequence CTCN PAM
ugagcucaggcaauggcgug

SEQ ID NO: 30862 - RNA, 20 nt, Artificial Sequence
  spacer sequence CTCN PAM
cacccguggacgcccguccu

SEQ ID NO: 30863 - RNA, 20 nt, Artificial Sequence
  spacer sequence CTCN PAM
cggccaccucugcccgcagg

SEQ ID NO: 30864 - RNA, 20 nt, Artificial Sequence
  spacer sequence CTCN PAM
gcccgcaggcacgcuacacc

SEQ ID NO: 30865 - RNA, 20 nt, Artificial Sequence
  spacer sequence CTCN PAM
ugagcgccacccggcacuac

SEQ ID NO: 30866 - RNA, 20 nt, Artificial Sequence
  spacer sequence CTCN PAM
ggaggucguucaggaucugc

SEQ ID NO: 30867 - RNA, 20 nt, Artificial Sequence
  spacer sequence CTCN PAM
gcugccacgcccagugcucc

SEQ ID NO: 30868 - RNA, 20 nt, Artificial Sequence
  spacer sequence CTCN PAM
ccggccucaccggcccccga

SEQ ID NO: 30869 - RNA, 20 nt, Artificial Sequence
  spacer sequence CTCN PAM
ccggcccccgaccuggcccc

SEQ ID NO: 30870 - RNA, 20 nt, Artificial Sequence
  spacer sequence CTCN PAM
ugcgagaagcucacggcugc

SEQ ID NO: 30871 - RNA, 20 nt, Artificial Sequence
  spacer sequence CTCN PAM
caggagguaguucugggggc

SEQ ID NO: 30872 - RNA, 20 nt, Artificial Sequence
  spacer sequence CTCN PAM
cggcugcccccucagccucc

SEQ ID NO: 30873 - RNA, 20 nt, Artificial Sequence
  spacer sequence CTCN PAM
gccucccugcugcagggcca

SEQ ID NO: 30874 - RNA, 20 nt, Artificial Sequence
  spacer sequence CTCN PAM
cugcugcagggccagagcca

SEQ ID NO: 30875 - RNA, 20 nt, Artificial Sequence
  spacer sequence CTCN PAM
ggcccugcagcagggaggcu

SEQ ID NO: 30876 - RNA, 20 nt, Artificial Sequence
  spacer sequence CTCN PAM
cccgggggcuugcacaugcg

SEQ ID NO: 30877 - RNA, 20 nt, Artificial Sequence
  spacer sequence CTCN PAM
gggguccuaccuuccccgcc

SEQ ID NO: 30878 - RNA, 20 nt, Artificial Sequence
  spacer sequence CTCN PAM
aggccccucugugugagcug

SEQ ID NO: 30879 - RNA, 20 nt, Artificial Sequence
  spacer sequence CTCN PAM
gugugagcuggugggcucag

SEQ ID NO: 30880 - RNA, 20 nt, Artificial Sequence
  spacer sequence CTCN PAM
cacagaggggccuugagaag

SEQ ID NO: 30881 - RNA, 20 nt, Artificial Sequence
  spacer sequence CTCN PAM
ggagcagcugaccugcccag

SEQ ID NO: 30882 - RNA, 20 nt, Artificial Sequence
  spacer sequence CTCN PAM
ugagcccaccagcucacaca

SEQ ID NO: 30883 - RNA, 20 nt, Artificial Sequence
  spacer sequence CTCN PAM
gcuccagcccggagagaagg

SEQ ID NO: 30884 - RNA, 20 nt, Artificial Sequence
  spacer sequence CTCN PAM
agcccggagagaaggcagca

SEQ ID NO: 30885 - RNA, 20 nt, Artificial Sequence
  spacer sequence CTCN PAM
gggcuggagcagagcagugg

SEQ ID NO: 30886 - RNA, 20 nt, Artificial Sequence
  spacer sequence CTCN PAM
ccgggcuggagcagagcagu

SEQ ID NO: 30887 - RNA, 20 nt, Artificial Sequence
  spacer sequence CTCN PAM
cggggggccacaggcccacu

SEQ ID NO: 30888 - RNA, 20 nt, Artificial Sequence
  spacer sequence CTCN PAM
ugccccacccccacccgggg

SEQ ID NO: 30889 - RNA, 20 nt, Artificial Sequence
  spacer sequence CTCN PAM
agauggcauuuggugccucu

SEQ ID NO: 30890 - RNA, 20 nt, Artificial Sequence
  spacer sequence CTCN PAM
gugaauggccaagucaggcc

SEQ ID NO: 30891 - RNA, 20 nt, Artificial Sequence
  spacer sequence CTCN PAM
gccugccaggccugacuugg

SEQ ID NO: 30892 - RNA, 20 nt, Artificial Sequence
  spacer sequence CTCN PAM
ggccccgccucggccugcca

SEQ ID NO: 30893 - RNA, 20 nt, Artificial Sequence
  spacer sequence CTCN PAM
caaacggcggguuacucccu

SEQ ID NO: 30894 - RNA, 20 nt, Artificial Sequence
  spacer sequence CTCN PAM
cuccagagucucaccagaag

SEQ ID NO: 30895 - RNA, 20 nt, Artificial Sequence
  spacer sequence CTCN PAM
agagucucaccagaagaugg

SEQ ID NO: 30896 - RNA, 20 nt, Artificial Sequence
  spacer sequence CTCN PAM
ggagggaguaacccgccguu

SEQ ID NO: 30897 - RNA, 20 nt, Artificial Sequence
  spacer sequence CTCN PAM
ccagaagauggcuacuguac

SEQ ID NO: 30898 - RNA, 20 nt, Artificial Sequence
  spacer sequence CTCN PAM
gcacccgucgcgggggcucc

SEQ ID NO: 30899 - RNA, 20 nt, Artificial Sequence
  spacer sequence CTCN PAM
ucccagcucaguuuaaaagu

SEQ ID NO: 30900 - RNA, 20 nt, Artificial Sequence
  spacer sequence CTCN PAM
cagcucaguuuaaaaguggg

SEQ ID NO: 30901 - RNA, 20 nt, Artificial Sequence
  spacer sequence CTCN PAM
guuuaaaagugggaaacugg

SEQ ID NO: 30902 - RNA, 20 nt, Artificial Sequence
  spacer sequence CTCN PAM
cgccuguaaucccagcacuu

SEQ ID NO: 30903 - RNA, 20 nt, Artificial Sequence
  spacer sequence CTCN PAM
caaagugcugggauuacagg

SEQ ID NO: 30904 - RNA, 20 nt, Artificial Sequence
  spacer sequence CTCN PAM
ugauccgcccgcgucggccu

SEQ ID NO: 30905 - RNA, 20 nt, Artificial Sequence
  spacer sequence CTCN PAM
ugaccucgugauccgcccgc

SEQ ID NO: 30906 - RNA, 20 nt, Artificial Sequence
  spacer sequence CTCN PAM
aucuccugaccucgugaucc

SEQ ID NO: 30907 - RNA, 20 nt, Artificial Sequence
  spacer sequence CTCN PAM
guuuccacuaaaaauacaaa

SEQ ID NO: 30908 - RNA, 20 nt, Artificial Sequence
  spacer sequence CTCN PAM
ggaggcugagacaggagaau

SEQ ID NO: 30909 - RNA, 20 nt, Artificial Sequence
  spacer sequence CTCN PAM
cgaguagcugggacuacagg

SEQ ID NO: 30910 - RNA, 20 nt, Artificial Sequence
  spacer sequence CTCN PAM
gccucccgaguagcugggac

SEQ ID NO: 30911 - RNA, 20 nt, Artificial Sequence
  spacer sequence CTCN PAM
ugucucagccucccgaguag

SEQ ID NO: 30912 - RNA, 20 nt, Artificial Sequence
  spacer sequence CTCN PAM
ggguucacgccauucuccug

SEQ ID NO: 30913 - RNA, 20 nt, Artificial Sequence
  spacer sequence CTCN PAM
gccucuggguucacgccauu

SEQ ID NO: 30914 - RNA, 20 nt, Artificial Sequence
  spacer sequence CTCN PAM
cugcaagcuccgccucuggg

SEQ ID NO: 30915 - RNA, 20 nt, Artificial Sequence
  spacer sequence CTCN PAM
gcucacugcaagcuccgccu

SEQ ID NO: 30916 - RNA, 20 nt, Artificial Sequence
  spacer sequence CTCN PAM
agccugggcgacagagcgag

SEQ ID NO: 30917 - RNA, 20 nt, Artificial Sequence
  spacer sequence CTCN PAM
gucgcccaggcuggagugca

SEQ ID NO: 30918 - RNA, 20 nt, Artificial Sequence
  spacer sequence CTCN PAM
cucugucgcccaggcuggag

SEQ ID NO: 30919 - RNA, 20 nt, Artificial Sequence
  spacer sequence CTCN PAM
gucucaaaaaaaaaaaaaaa

SEQ ID NO: 30920 - RNA, 20 nt, Artificial Sequence
  spacer sequence CTCN PAM
aaaaaaaaaaaaaaaaacca

SEQ ID NO: 30921 - RNA, 20 nt, Artificial Sequence
  spacer sequence CTCN PAM
ccucggaucacagaagcggc

SEQ ID NO: 30922 - RNA, 20 nt, Artificial Sequence
  spacer sequence CTCN PAM
gaucacagaagcggccaagc

SEQ ID NO: 30923 - RNA, 20 nt, Artificial Sequence
  spacer sequence CTCN PAM
auguaggacuccaggaagaa

SEQ ID NO: 30924 - RNA, 20 nt, Artificial Sequence
  spacer sequence CTCN PAM
aggaagaaugaggcaggaca

SEQ ID NO: 30925 - RNA, 20 nt, Artificial Sequence
  spacer sequence CTCN PAM
uucuuccuggaguccuacau

SEQ ID NO: 30926 - RNA, 20 nt, Artificial Sequence
  spacer sequence CTCN PAM
ccagcucauggcugagcugg

SEQ ID NO: 30927 - RNA, 20 nt, Artificial Sequence
  spacer sequence CTCN PAM
uggcugagcuggagaauuag

SEQ ID NO: 30928 - RNA, 20 nt, Artificial Sequence
  spacer sequence CTCN PAM
gccaugagcuggggagguca

SEQ ID NO: 30929 - RNA, 20 nt, Artificial Sequence
  spacer sequence CTCN PAM
agcucagccaugagcugggg

SEQ ID NO: 30930 - RNA, 20 nt, Artificial Sequence
  spacer sequence CTCN PAM
aggcaaacaccaccaugccc

SEQ ID NO: 30931 - RNA, 20 nt, Artificial Sequence
  spacer sequence CTCN PAM
acaaaaauuacaaaauuagc

SEQ ID NO: 30932 - RNA, 20 nt, Artificial Sequence
  spacer sequence CTCN PAM
ucuacaaaaauuacaaaauu

SEQ ID NO: 30933 - RNA, 20 nt, Artificial Sequence
  spacer sequence CTCN PAM
cucuguggcucaggccuguc

SEQ ID NO: 30934 - RNA, 20 nt, Artificial Sequence
  spacer sequence CTCN PAM
guggcucaggccugucucga

SEQ ID NO: 30935 - RNA, 20 nt, Artificial Sequence
  spacer sequence CTCN PAM
ggccugucucgaacuccuga

SEQ ID NO: 30936 - RNA, 20 nt, Artificial Sequence
  spacer sequence CTCN PAM
aacuccugagguugcccagg

SEQ ID NO: 30937 - RNA, 20 nt, Artificial Sequence
  spacer sequence CTCN PAM
ugagguugcccaggccuguc

SEQ ID NO: 30938 - RNA, 20 nt, Artificial Sequence
  spacer sequence CTCN PAM
ggaguucgagacaggccuga

SEQ ID NO: 30939 - RNA, 20 nt, Artificial Sequence
  spacer sequence CTCN PAM
aacuccugagcucaagcgau

SEQ ID NO: 30940 - RNA, 20 nt, Artificial Sequence
  spacer sequence CTCN PAM
ugagcucaagcgauucuccu

SEQ ID NO: 30941 - RNA, 20 nt, Artificial Sequence
  spacer sequence CTCN PAM
ggaguucgagacaggccugg

SEQ ID NO: 30942 - RNA, 20 nt, Artificial Sequence
  spacer sequence CTCN PAM
agcgauucuccugccucggc

SEQ ID NO: 30943 - RNA, 20 nt, Artificial Sequence
  spacer sequence CTCN PAM
ugccucggccucccaaagug

SEQ ID NO: 30944 - RNA, 20 nt, Artificial Sequence
  spacer sequence CTCN PAM
gccucccaaagugcugagau

SEQ ID NO: 30945 - RNA, 20 nt, Artificial Sequence
  spacer sequence CTCN PAM
caaagugcugagauuacagg

SEQ ID NO: 30946 - RNA, 20 nt, Artificial Sequence
  spacer sequence CTCN PAM
gcacuuugggaggccgaggc

SEQ ID NO: 30947 - RNA, 20 nt, Artificial Sequence
  spacer sequence CTCN PAM
cuccagggagggcaggacug

SEQ ID NO: 30948 - RNA, 20 nt, Artificial Sequence
  spacer sequence CTCN PAM
agggagggcaggacuguguc

SEQ ID NO: 30949 - RNA, 20 nt, Artificial Sequence
  spacer sequence CTCN PAM
cuggagggaggucagcaaag

SEQ ID NO: 30950 - RNA, 20 nt, Artificial Sequence
  spacer sequence CTCN PAM
ggggcauuugcuggggucug

SEQ ID NO: 30951 - RNA, 20 nt, Artificial Sequence
  spacer sequence CTCN PAM
guguucagcagguggaggcu

SEQ ID NO: 30952 - RNA, 20 nt, Artificial Sequence
  spacer sequence CTCN PAM
accugcugaacacagaggac

SEQ ID NO: 30953 - RNA, 20 nt, Artificial Sequence
  spacer sequence CTCN PAM
caaagccuccaccugcugaa

SEQ ID NO: 30954 - RNA, 20 nt, Artificial Sequence
  spacer sequence CTCN PAM
uuugcaggggaccggcuucg

SEQ ID NO: 30955 - RNA, 20 nt, Artificial Sequence
  spacer sequence CTCN PAM
guagaaaggcccggcgggac

SEQ ID NO: 30956 - RNA, 20 nt, Artificial Sequence
  spacer sequence CTCN PAM
cuggggcugccgccgccccc

SEQ ID NO: 30957 - RNA, 20 nt, Artificial Sequence
  spacer sequence CTCN PAM
ggcuugggccucgacuucga

SEQ ID NO: 30958 - RNA, 20 nt, Artificial Sequence
  spacer sequence CTCN PAM
acuucgaggacuccgugugg

SEQ ID NO: 30959 - RNA, 20 nt, Artificial Sequence
  spacer sequence CTCN PAM
aagucgaggcccaagccgga

SEQ ID NO: 30960 - RNA, 20 nt, Artificial Sequence
  spacer sequence CTCN PAM
guguggaagccagaagucaa

SEQ ID NO: 30961 - RNA, 20 nt, Artificial Sequence
  spacer sequence CTCN PAM
gacuugaugucaggguugac

SEQ ID NO: 30962 - RNA, 20 nt, Artificial Sequence
  spacer sequence CTCN PAM
ccccucgcaccccagcccag

SEQ ID NO: 30963 - RNA, 20 nt, Artificial Sequence
  spacer sequence CTCN PAM
caccccagcccagggcggcg

SEQ ID NO: 30964 - RNA, 20 nt, Artificial Sequence
  spacer sequence CTCN PAM
gagagccccggagagaacgu

SEQ ID NO: 30965 - RNA, 20 nt, Artificial Sequence
  spacer sequence CTCN PAM
gaguccccgccgcccugggc

SEQ ID NO: 30966 - RNA, 20 nt, Artificial Sequence
  spacer sequence CTCN PAM
cggaguccccgccgcccugg

SEQ ID NO: 30967 - RNA, 20 nt, Artificial Sequence
  spacer sequence CTCN PAM
ggggcucucggaguccccgc

SEQ ID NO: 30968 - RNA, 20 nt, Artificial Sequence
  spacer sequence CTCN PAM
ccggggcucucggagucccc

SEQ ID NO: 30969 - RNA, 20 nt, Artificial Sequence
  spacer sequence CTCN PAM
agggcugggccacguucucu

SEQ ID NO: 30970 - RNA, 20 nt, Artificial Sequence
  spacer sequence CTCN PAM
cccagccagaagucuuuuuu

SEQ ID NO: 30971 - RNA, 20 nt, Artificial Sequence
  spacer sequence CTCN PAM
ucaugggcuuugcuuccuac

SEQ ID NO: 30972 - RNA, 20 nt, Artificial Sequence
  spacer sequence CTCN PAM
uucacccuucacuccugccc

SEQ ID NO: 30973 - RNA, 20 nt, Artificial Sequence
  spacer sequence CTCN PAM
ugcccuccucuuccuccucc

SEQ ID NO: 30974 - RNA, 20 nt, Artificial Sequence
  spacer sequence CTCN PAM
ucuuccuccuccuccuccuc

SEQ ID NO: 30975 - RNA, 20 nt, Artificial Sequence
  spacer sequence CTCN PAM
uccuccuccuccuccuccuc

SEQ ID NO: 30976 - RNA, 20 nt, Artificial Sequence
  spacer sequence CTCN PAM
uccuccuccuccuccgucug

SEQ ID NO: 30977 - RNA, 20 nt, Artificial Sequence
  spacer sequence CTCN PAM
uccuccuccuccgucugucu

SEQ ID NO: 30978 - RNA, 20 nt, Artificial Sequence
  spacer sequence CTCN PAM
uccuccuccgucugucuccu

SEQ ID NO: 30979 - RNA, 20 nt, Artificial Sequence
  spacer sequence CTCN PAM
uccuccgucugucuccuuuc

SEQ ID NO: 30980 - RNA, 20 nt, Artificial Sequence
  spacer sequence CTCN PAM
uccgucugucuccuuucacc

SEQ ID NO: 30981 - RNA, 20 nt, Artificial Sequence
  spacer sequence CTCN PAM
gucugucuccuuucaccucu

SEQ ID NO: 30982 - RNA, 20 nt, Artificial Sequence
  spacer sequence CTCN PAM
uuucaccucugcgccagguc

SEQ ID NO: 30983 - RNA, 20 nt, Artificial Sequence
  spacer sequence CTCN PAM
gcgccaggucgguccucccu

SEQ ID NO: 30984 - RNA, 20 nt, Artificial Sequence
  spacer sequence CTCN PAM
cugccaaccuuccccagcuc

SEQ ID NO: 30985 - RNA, 20 nt, Artificial Sequence
  spacer sequence CTCN PAM
aauauguagcagucucucug

SEQ ID NO: 30986 - RNA, 20 nt, Artificial Sequence
  spacer sequence CTCN PAM
cuggauggcggagagugaag

SEQ ID NO: 30987 - RNA, 20 nt, Artificial Sequence
  spacer sequence CTCN PAM
ggauggcggagagugaagga

SEQ ID NO: 30988 - RNA, 20 nt, Artificial Sequence
  spacer sequence CTCN PAM
gccauccagagagacugcua

SEQ ID NO: 30989 - RNA, 20 nt, Artificial Sequence
  spacer sequence CTCN PAM
ccgccauccagagagacugc

SEQ ID NO: 30990 - RNA, 20 nt, Artificial Sequence
  spacer sequence CTCN PAM
uucacucuccgccauccaga

SEQ ID NO: 30991 - RNA, 20 nt, Artificial Sequence
  spacer sequence CTCN PAM
gucuccuucacucuccgcca

SEQ ID NO: 30992 - RNA, 20 nt, Artificial Sequence
  spacer sequence CTCN PAM
uuucccccccgacccuauuc

SEQ ID NO: 30993 - RNA, 20 nt, Artificial Sequence
  spacer sequence CTCN PAM
ucuguaaagugcauaaugac

SEQ ID NO: 30994 - RNA, 20 nt, Artificial Sequence
  spacer sequence CTCN PAM
ccucaucuguaaagugcaua

SEQ ID NO: 30995 - RNA, 20 nt, Artificial Sequence
  spacer sequence CTCN PAM
accccaggccagcagcgccc

SEQ ID NO: 30996 - RNA, 20 nt, Artificial Sequence
  spacer sequence CTCN PAM
uuggcuucugugaccuguug

SEQ ID NO: 30997 - RNA, 20 nt, Artificial Sequence
  spacer sequence CTCN PAM
uccacuccuauccucuuuuc

SEQ ID NO: 30998 - RNA, 20 nt, Artificial Sequence
  spacer sequence CTCN PAM
uauccucuuuucuugaucuu

SEQ ID NO: 30999 - RNA, 20 nt, Artificial Sequence
  spacer sequence CTCN PAM
uuucuugaucuuuuuuuugc

SEQ ID NO: 31000 - RNA, 20 nt, Artificial Sequence
  spacer sequence CTCN PAM
uuguuaaagaaaugaaggaa

SEQ ID NO: 31001 - RNA, 20 nt, Artificial Sequence
  spacer sequence CTCN PAM
ccuuguuaaagaaaugaagg

SEQ ID NO: 31002 - RNA, 20 nt, Artificial Sequence
  spacer sequence CTCN PAM
gcuaaaacagcuuugcucuc

SEQ ID NO: 31003 - RNA, 20 nt, Artificial Sequence
  spacer sequence CTCN PAM
gccccagccucugcuaaaac

SEQ ID NO: 31004 - RNA, 20 nt, Artificial Sequence
  spacer sequence CTCN PAM
cuucccgacaggaaagggug

SEQ ID NO: 31005 - RNA, 20 nt, Artificial Sequence
  spacer sequence CTCN PAM
cccuucccgacaggaaaggg

SEQ ID NO: 31006 - RNA, 20 nt, Artificial Sequence
  spacer sequence CTCN PAM
gccccgccccagccggcgga

SEQ ID NO: 31007 - RNA, 20 nt, Artificial Sequence
  spacer sequence CTCN PAM
gcccccacucccguguuuuc

SEQ ID NO: 31008 - RNA, 20 nt, Artificial Sequence
  spacer sequence CTCN PAM
cguguuuucugaccuccugc

SEQ ID NO: 31009 - RNA, 20 nt, Artificial Sequence
  spacer sequence CTCN PAM
ugccugaguuugggguauuu

SEQ ID NO: 31010 - RNA, 20 nt, Artificial Sequence
  spacer sequence CTCN PAM
ggcaggaggucagaaaacac

SEQ ID NO: 31011 - RNA, 20 nt, Artificial Sequence
  spacer sequence CTCN PAM
gucagaaaauuaauagucua

SEQ ID NO: 31012 - RNA, 20 nt, Artificial Sequence
  spacer sequence CTCN PAM
ugaaaaaggggagagaaugg

SEQ ID NO: 31013 - RNA, 20 nt, Artificial Sequence
  spacer sequence CTCN PAM
ccuuuuucaagaguucccca

SEQ ID NO: 31014 - RNA, 20 nt, Artificial Sequence
  spacer sequence CTCN PAM
ccccuuuuucaagaguuccc

SEQ ID NO: 31015 - RNA, 20 nt, Artificial Sequence
  spacer sequence CTCN PAM
ccagcacccagccauucucu

SEQ ID NO: 31016 - RNA, 20 nt, Artificial Sequence
  spacer sequence CTCN PAM
gagcccuccuucccggccca

SEQ ID NO: 31017 - RNA, 20 nt, Artificial Sequence
  spacer sequence CTCN PAM
gaggggggaacuccccagca

SEQ ID NO: 31018 - RNA, 20 nt, Artificial Sequence
  spacer sequence CTCN PAM
uucccggcccaaccugaggg

SEQ ID NO: 31019 - RNA, 20 nt, Artificial Sequence
  spacer sequence CTCN PAM
gguugggccgggaaggaggg

SEQ ID NO: 31020 - RNA, 20 nt, Artificial Sequence
  spacer sequence CTCN PAM
ugcagcgaggaugggagggg

SEQ ID NO: 31021 - RNA, 20 nt, Artificial Sequence
  spacer sequence CTCN PAM
cugcaggaggggcccccaga

SEQ ID NO: 31022 - RNA, 20 nt, Artificial Sequence
  spacer sequence CTCN PAM
cauccucgcugcaggagggg

SEQ ID NO: 31023 - RNA, 20 nt, Artificial Sequence
  spacer sequence CTCN PAM
gcacccccucccauccucgc

SEQ ID NO: 31024 - RNA, 20 nt, Artificial Sequence
  spacer sequence CTCN PAM
guguagcauuaacccccgug

SEQ ID NO: 31025 - RNA, 20 nt, Artificial Sequence
  spacer sequence CTCN PAM
cagugccccugcccuagggg

SEQ ID NO: 31026 - RNA, 20 nt, Artificial Sequence
  spacer sequence CTCN PAM
gugccccugcccuaggggug

SEQ ID NO: 31027 - RNA, 20 nt, Artificial Sequence
  spacer sequence CTCN PAM
agaggggagggacaaauccc

SEQ ID NO: 31028 - RNA, 20 nt, Artificial Sequence
  spacer sequence CTCN PAM
ggagacagacaccccuaggg

SEQ ID NO: 31029 - RNA, 20 nt, Artificial Sequence
  spacer sequence CTCN PAM
ccucuggagacagacacccc

SEQ ID NO: 31030 - RNA, 20 nt, Artificial Sequence
  spacer sequence CTCN PAM
cuuuuuauuuuuuaaugaua

SEQ ID NO: 31031 - RNA, 20 nt, Artificial Sequence
  spacer sequence CTCN PAM
auuaucauuaaaaaauaaaa

SEQ ID NO: 31032 - RNA, 20 nt, Artificial Sequence
  spacer sequence CTCN PAM
ccccaccugucggucuuguc

SEQ ID NO: 31033 - RNA, 20 nt, Artificial Sequence
  spacer sequence CTCN PAM
gccugucccccaccguuguu

SEQ ID NO: 31034 - RNA, 20 nt, Artificial Sequence
  spacer sequence CTCN PAM
uaggugaaccccagguccuc

SEQ ID NO: 31035 - RNA, 20 nt, Artificial Sequence
  spacer sequence CTCN PAM
acucccccccuuuauguguu

SEQ ID NO: 31036 - RNA, 20 nt, Artificial Sequence
  spacer sequence CTCN PAM
cccccuuuauguguugaaag

SEQ ID NO: 31037 - RNA, 20 nt, Artificial Sequence
  spacer sequence CTCN PAM
cacaaaaaaauuuacagcgc

SEQ ID NO: 31038 - RNA, 20 nt, Artificial Sequence
  spacer sequence CTCN PAM
cugcccacccucccacaaaa

SEQ ID NO: 31039 - RNA, 20 nt, Artificial Sequence
  spacer sequence CTCN PAM
gggaccccucccugcccacc

SEQ ID NO: 31040 - RNA, 20 nt, Artificial Sequence
  spacer sequence CTCN PAM
acccucugggaccccucccu

SEQ ID NO: 31041 - RNA, 20 nt, Artificial Sequence
  spacer sequence CTCN PAM
aggauuuuggguuuuguuuu

SEQ ID NO: 31042 - RNA, 20 nt, Artificial Sequence
  spacer sequence CTCN PAM
uuuuuuuucuauuuuuuuuu

SEQ ID NO: 31043 - RNA, 20 nt, Artificial Sequence
  spacer sequence CTCN PAM
acugguugaggguggaaccu

SEQ ID NO: 31044 - RNA, 20 nt, Artificial Sequence
  spacer sequence CTCN PAM
accaguggaggcacagacgu

SEQ ID NO: 31045 - RNA, 20 nt, Artificial Sequence
  spacer sequence CTCN PAM
aggcaggaaccggcucgcca

SEQ ID NO: 31046 - RNA, 20 nt, Artificial Sequence
  spacer sequence CTCN PAM
ccacccucugcccgguaagg

SEQ ID NO: 31047 - RNA, 20 nt, Artificial Sequence
  spacer sequence CTCN PAM
gcccgguaagggcugcccaa

SEQ ID NO: 31048 - RNA, 20 nt, Artificial Sequence
  spacer sequence CTCN PAM
gggggucgggcugugggggu

SEQ ID NO: 31049 - RNA, 20 nt, Artificial Sequence
  spacer sequence CTCN PAM
cgccaggugccgggaccccc

SEQ ID NO: 31050 - RNA, 20 nt, Artificial Sequence
  spacer sequence CTCN PAM
uguagguuuuuuuuuuuuuu

SEQ ID NO: 31051 - RNA, 20 nt, Artificial Sequence
  spacer sequence CTCN PAM
cgccugcucgccuagugggg

SEQ ID NO: 31052 - RNA, 20 nt, Artificial Sequence
  spacer sequence CTCN PAM
ccuaguggggggaucuggcc

SEQ ID NO: 31053 - RNA, 20 nt, Artificial Sequence
  spacer sequence CTCN PAM
caaccaaggccagauccccc

SEQ ID NO: 31054 - RNA, 20 nt, Artificial Sequence
  spacer sequence CTCN PAM
gggagucagagggacugacc

SEQ ID NO: 31055 - RNA, 20 nt, Artificial Sequence
  spacer sequence CTCN PAM
cugagcugacaucccacccc

SEQ ID NO: 31056 - RNA, 20 nt, Artificial Sequence
  spacer sequence CTCN PAM
gacucccugagcugacaucc

SEQ ID NO: 31057 - RNA, 20 nt, Artificial Sequence
  spacer sequence CTCN PAM
ucggggccuugggacccagg

SEQ ID NO: 31058 - RNA, 20 nt, Artificial Sequence
  spacer sequence CTCN PAM
gggcccugaccccugcccca

SEQ ID NO: 31059 - RNA, 20 nt, Artificial Sequence
  spacer sequence CTCN PAM
uuccccggcugccggguggg

SEQ ID NO: 31060 - RNA, 20 nt, Artificial Sequence
  spacer sequence CTCN PAM
cacccuggcugcuuccugcc

SEQ ID NO: 31061 - RNA, 20 nt, Artificial Sequence
  spacer sequence CTCN PAM
cucccacccuggcugcuucc

SEQ ID NO: 31062 - RNA, 20 nt, Artificial Sequence
  spacer sequence CTCN PAM
ucccucccacccuggcugcu

SEQ ID NO: 31063 - RNA, 20 nt, Artificial Sequence
  spacer sequence CTCN PAM
ccccacacccuaagggacuu

SEQ ID NO: 31064 - RNA, 20 nt, Artificial Sequence
  spacer sequence CTCN PAM
ggaccugccaguauggggga

SEQ ID NO: 31065 - RNA, 20 nt, Artificial Sequence
  spacer sequence CTCN PAM
cccauacuggcagguccuga

SEQ ID NO: 31066 - RNA, 20 nt, Artificial Sequence
  spacer sequence CTCN PAM
ccccagccacaggagucggg

SEQ ID NO: 31067 - RNA, 20 nt, Artificial Sequence
  spacer sequence CTCN PAM
ccagccacaggagucgggga

SEQ ID NO: 31068 - RNA, 20 nt, Artificial Sequence
  spacer sequence CTCN PAM
uguggcuggggagagcuggu

SEQ ID NO: 31069 - RNA, 20 nt, Artificial Sequence
  spacer sequence CTCN PAM
cacucugccacacccaccug

SEQ ID NO: 31070 - RNA, 20 nt, Artificial Sequence
  spacer sequence CTCN PAM
gccacacccaccugcucccc

SEQ ID NO: 31071 - RNA, 20 nt, Artificial Sequence
  spacer sequence CTCN PAM
ccuuccuggagucucacauc

SEQ ID NO: 31072 - RNA, 20 nt, Artificial Sequence
  spacer sequence CTCN PAM
aggaaggggagcaggugggu

SEQ ID NO: 31073 - RNA, 20 nt, Artificial Sequence
  spacer sequence CTCN PAM
caucuguguggcuugcugca

SEQ ID NO: 31074 - RNA, 20 nt, Artificial Sequence
  spacer sequence CTCN PAM
cugcagcaagccacacagau

SEQ ID NO: 31075 - RNA, 20 nt, Artificial Sequence
  spacer sequence CTCN PAM
cagucggccuggugaucucc

SEQ ID NO: 31076 - RNA, 20 nt, Artificial Sequence
  spacer sequence CTCN PAM
gcaggguaccuugggcuggc

SEQ ID NO: 31077 - RNA, 20 nt, Artificial Sequence
  spacer sequence CTCN PAM
cuggccacaccuccugacau

SEQ ID NO: 31078 - RNA, 20 nt, Artificial Sequence
  spacer sequence CTCN PAM
ggccacaccuccugacauuc

SEQ ID NO: 31079 - RNA, 20 nt, Artificial Sequence
  spacer sequence CTCN PAM
ugacauuccagcccuuccca

SEQ ID NO: 31080 - RNA, 20 nt, Artificial Sequence
  spacer sequence CTCN PAM
aaaccucccggccuuugccc

SEQ ID NO: 31081 - RNA, 20 nt, Artificial Sequence
  spacer sequence CTCN PAM
cggccuuugcccccugucua

SEQ ID NO: 31082 - RNA, 20 nt, Artificial Sequence
  spacer sequence CTCN PAM
cucugucccuagccuggagc

SEQ ID NO: 31083 - RNA, 20 nt, Artificial Sequence
  spacer sequence CTCN PAM
cugucccuagccuggagcuc

SEQ ID NO: 31084 - RNA, 20 nt, Artificial Sequence
  spacer sequence CTCN PAM
gucccuagccuggagcuccc

SEQ ID NO: 31085 - RNA, 20 nt, Artificial Sequence
  spacer sequence CTCN PAM
aggcuagggacagagagagg

SEQ ID NO: 31086 - RNA, 20 nt, Artificial Sequence
  spacer sequence CTCN PAM
ccgugagccucaccaggacu

SEQ ID NO: 31087 - RNA, 20 nt, Artificial Sequence
  spacer sequence CTCN PAM
cggggagcuccaggcuaggg

SEQ ID NO: 31088 - RNA, 20 nt, Artificial Sequence
  spacer sequence CTCN PAM
ccaggacugaguccucucug

SEQ ID NO: 31089 - RNA, 20 nt, Artificial Sequence
  spacer sequence CTCN PAM
guccuggugaggcucacggg

SEQ ID NO: 31090 - RNA, 20 nt, Artificial Sequence
  spacer sequence CTCN PAM
cuggggucccaccuccaccc

SEQ ID NO: 31091 - RNA, 20 nt, Artificial Sequence
  spacer sequence CTCN PAM
ggggucccaccuccacccau

SEQ ID NO: 31092 - RNA, 20 nt, Artificial Sequence
  spacer sequence CTCN PAM
acccauguccgggcugggca

SEQ ID NO: 31093 - RNA, 20 nt, Artificial Sequence
  spacer sequence CTCN PAM
gcccagcccggacaugggug

SEQ ID NO: 31094 - RNA, 20 nt, Artificial Sequence
  spacer sequence CTCN PAM
ucucugcccagcccggacau

SEQ ID NO: 31095 - RNA, 20 nt, Artificial Sequence
  spacer sequence CTCN PAM
gguaacaagaguugccuaug

SEQ ID NO: 31096 - RNA, 20 nt, Artificial Sequence
  spacer sequence CTCN PAM
uguuaccugaggaaauacag

SEQ ID NO: 31097 - RNA, 20 nt, Artificial Sequence
  spacer sequence CTCN PAM
uaggcaacucuuguuaccug

SEQ ID NO: 31098 - RNA, 20 nt, Artificial Sequence
  spacer sequence CTCN PAM
cauuuuauagaugggagaac

SEQ ID NO: 31099 - RNA, 20 nt, Artificial Sequence
  spacer sequence CTCN PAM
caucuauaaaaugggagccc

SEQ ID NO: 31100 - RNA, 20 nt, Artificial Sequence
  spacer sequence CTCN PAM
guucucccaucuauaaaaug

SEQ ID NO: 31101 - RNA, 20 nt, Artificial Sequence
  spacer sequence CTCN PAM
uugggccucuguucucccau

SEQ ID NO: 31102 - RNA, 20 nt, Artificial Sequence
  spacer sequence CTCN PAM
gggccaagugauguuccucu

SEQ ID NO: 31103 - RNA, 20 nt, Artificial Sequence
  spacer sequence CTCN PAM
accccuuaucccaucucuag

SEQ ID NO: 31104 - RNA, 20 nt, Artificial Sequence
  spacer sequence CTCN PAM
aggggccccaguaccgggag

SEQ ID NO: 31105 - RNA, 20 nt, Artificial Sequence
  spacer sequence CTCN PAM
cgguacuggggccccuagag

SEQ ID NO: 31106 - RNA, 20 nt, Artificial Sequence
  spacer sequence CTCN PAM
gaaccugugccccuuccccu

SEQ ID NO: 31107 - RNA, 20 nt, Artificial Sequence
  spacer sequence CTCN PAM
cugaaccugugccccuuccc

SEQ ID NO: 31108 - RNA, 20 nt, Artificial Sequence
  spacer sequence CTCN PAM
caggccacucucugaaccug

SEQ ID NO: 31109 - RNA, 20 nt, Artificial Sequence
  spacer sequence CTCN PAM
ggaaggugcucccaggccac

SEQ ID NO: 31110 - RNA, 20 nt, Artificial Sequence
  spacer sequence CTCN PAM
gccccucccaacgcccaguc

SEQ ID NO: 31111 - RNA, 20 nt, Artificial Sequence
  spacer sequence CTCN PAM
caacgcccagucaaccccaa

SEQ ID NO: 31112 - RNA, 20 nt, Artificial Sequence
  spacer sequence CTCN PAM
gggcucagggugggggugcg

SEQ ID NO: 31113 - RNA, 20 nt, Artificial Sequence
  spacer sequence CTCN PAM
gggugggggugcgggucacc

SEQ ID NO: 31114 - RNA, 20 nt, Artificial Sequence
  spacer sequence CTCN PAM
ccuugaccccaggccuggcg

SEQ ID NO: 31115 - RNA, 20 nt, Artificial Sequence
  spacer sequence CTCN PAM
cugggcggggugggaaggag

SEQ ID NO: 31116 - RNA, 20 nt, Artificial Sequence
  spacer sequence CTCN PAM
uucccaccccgcccagcgag

SEQ ID NO: 31117 - RNA, 20 nt, Artificial Sequence
  spacer sequence CTCN PAM
uuccuccuucccaccccgcc

SEQ ID NO: 31118 - RNA, 20 nt, Artificial Sequence
  spacer sequence CTCN PAM
aggacccgccccucgggaug

SEQ ID NO: 31119 - RNA, 20 nt, Artificial Sequence
  spacer sequence CTCN PAM
ggaugccgacccccacccca

SEQ ID NO: 31120 - RNA, 20 nt, Artificial Sequence
  spacer sequence CTCN PAM
auaccccaccccacgccccc

SEQ ID NO: 31121 - RNA, 20 nt, Artificial Sequence
  spacer sequence CTCN PAM
aggcucagagcccuggccug

SEQ ID NO: 31122 - RNA, 20 nt, Artificial Sequence
  spacer sequence CTCN PAM
gagcccuggccugguagggu

SEQ ID NO: 31123 - RNA, 20 nt, Artificial Sequence
  spacer sequence CTCN PAM
gagccuggagcuccauaccc

SEQ ID NO: 31124 - RNA, 20 nt, Artificial Sequence
  spacer sequence CTCN PAM
gcccgcugcaccccugguug

SEQ ID NO: 31125 - RNA, 20 nt, Artificial Sequence
  spacer sequence CTCN PAM
gccugccgccccuccgcccg

SEQ ID NO: 31126 - RNA, 20 nt, Artificial Sequence
  spacer sequence CTCN PAM
gugcuucccuacgcacacuu

SEQ ID NO: 31127 - RNA, 20 nt, Artificial Sequence
  spacer sequence CTCN PAM
ccgugcuucccuacgcacac

SEQ ID NO: 31128 - RNA, 20 nt, Artificial Sequence
  spacer sequence CTCN PAM
guuuaccucuccgugcuucc

SEQ ID NO: 31129 - RNA, 20 nt, Artificial Sequence
  spacer sequence CTCN PAM
uugugccucaguuuaccucu

SEQ ID NO: 31130 - RNA, 20 nt, Artificial Sequence
  spacer sequence CTCN PAM
cggggcggggucggcccugg

SEQ ID NO: 31131 - RNA, 20 nt, Artificial Sequence
  spacer sequence CTCN PAM
cuucccccaaccauugagga

SEQ ID NO: 31132 - RNA, 20 nt, Artificial Sequence
  spacer sequence CTCN PAM
augguugggggaagggagcg

SEQ ID NO: 31133 - RNA, 20 nt, Artificial Sequence
  spacer sequence CTCN PAM
cauucagcuuuuuccucaau

SEQ ID NO: 31134 - RNA, 20 nt, Artificial Sequence
  spacer sequence CTCN PAM
uuucgcggcgcguugcccug

SEQ ID NO: 31135 - RNA, 20 nt, Artificial Sequence
  spacer sequence CTCN PAM
uuggugaucgcaccgcucgc

SEQ ID NO: 31136 - RNA, 20 nt, Artificial Sequence
  spacer sequence CTCN PAM
cucaucggcgugccccagua

SEQ ID NO: 31137 - RNA, 20 nt, Artificial Sequence
  spacer sequence CTCN PAM
ucggcgugccccaguagcag

SEQ ID NO: 31138 - RNA, 20 nt, Artificial Sequence
  spacer sequence CTCN PAM
agaaggcgggacuucagccc

SEQ ID NO: 31139 - RNA, 20 nt, Artificial Sequence
  spacer sequence CTCN PAM
gcgcugccgggcugaagucc

SEQ ID NO: 31140 - RNA, 20 nt, Artificial Sequence
  spacer sequence CTCN PAM
gcgcuugcgccugcgcacuc

SEQ ID NO: 31141 - RNA, 20 nt, Artificial Sequence
  spacer sequence CTCN PAM
cuccccgcgcgucugcaaag

SEQ ID NO: 31142 - RNA, 20 nt, Artificial Sequence
  spacer sequence CTCN PAM
ccccgcgcgucugcaaaguu

SEQ ID NO: 31143 - RNA, 20 nt, Artificial Sequence
  spacer sequence CTCN PAM
ccgcgcgucugcaaaguugg

SEQ ID NO: 31144 - RNA, 20 nt, Artificial Sequence
  spacer sequence CTCN PAM
cgcccccaacuuugcagacg

SEQ ID NO: 31145 - RNA, 20 nt, Artificial Sequence
  spacer sequence CTCN PAM
gcugcgccucccgcccccaa

SEQ ID NO: 31146 - RNA, 20 nt, Artificial Sequence
  spacer sequence CTCN PAM
uccguccaggccccgccgca

SEQ ID NO: 31147 - RNA, 20 nt, Artificial Sequence
  spacer sequence CTCN PAM
cccccucuuccguccaggcc

SEQ ID NO: 31148 - RNA, 20 nt, Artificial Sequence
  spacer sequence CTCN PAM
cgugcacccguccuuucacg

SEQ ID NO: 31149 - RNA, 20 nt, Artificial Sequence
  spacer sequence CTCN PAM
ccgcggucccuaggcugggg

SEQ ID NO: 31150 - RNA, 20 nt, Artificial Sequence
  spacer sequence CTCN PAM
cccagccuagggaccgcggg

SEQ ID NO: 31151 - RNA, 20 nt, Artificial Sequence
  spacer sequence CTCN PAM
gacaggaggcuaggaggagg

SEQ ID NO: 31152 - RNA, 20 nt, Artificial Sequence
  spacer sequence CTCN PAM
ugucugagcucccccagccu

SEQ ID NO: 31153 - RNA, 20 nt, Artificial Sequence
  spacer sequence CTCN PAM
uagccuccugucugagcucc

SEQ ID NO: 31154 - RNA, 20 nt, Artificial Sequence
  spacer sequence CTCN PAM
uccuagccuccugucugagc

SEQ ID NO: 31155 - RNA, 20 nt, Artificial Sequence
  spacer sequence CTCN PAM
gccccaaagucccccuccuc

SEQ ID NO: 31156 - RNA, 20 nt, Artificial Sequence
  spacer sequence CTCN PAM
uuuggcaaagccucagcccc

SEQ ID NO: 31157 - RNA, 20 nt, Artificial Sequence
  spacer sequence CTCN PAM
ugcuccuuuggcaaagccuc

SEQ ID NO: 31158 - RNA, 20 nt, Artificial Sequence
  spacer sequence CTCN PAM
guuucacguuuccgggccuu

SEQ ID NO: 31159 - RNA, 20 nt, Artificial Sequence
  spacer sequence CTCN PAM
accaacugacuucccgguug

SEQ ID NO: 31160 - RNA, 20 nt, Artificial Sequence
  spacer sequence CTCN PAM
caucuuugauuuuucuccac

SEQ ID NO: 31161 - RNA, 20 nt, Artificial Sequence
  spacer sequence CTCN PAM
ccuuuccucccaucuuugau

SEQ ID NO: 31162 - RNA, 20 nt, Artificial Sequence
  spacer sequence CTCN PAM
aguggccgacuuggggaauc

SEQ ID NO: 31163 - RNA, 20 nt, Artificial Sequence
  spacer sequence CTCN PAM
ggucccccaagucaucccuc

SEQ ID NO: 31164 - RNA, 20 nt, Artificial Sequence
  spacer sequence CTCN PAM
cuggucccccaagucauccc

SEQ ID NO: 31165 - RNA, 20 nt, Artificial Sequence
  spacer sequence CTCN PAM
uccucucuggucccccaagu

SEQ ID NO: 31166 - RNA, 20 nt, Artificial Sequence
  spacer sequence CTCN PAM
ccugcucuuccucucugguc

SEQ ID NO: 31167 - RNA, 20 nt, Artificial Sequence
  spacer sequence CTCN PAM
cccucaccugcucuuccucu

SEQ ID NO: 31168 - RNA, 20 nt, Artificial Sequence
  spacer sequence CTCN PAM
cagauguccuggccgccgcu

SEQ ID NO: 31169 - RNA, 20 nt, Artificial Sequence
  spacer sequence CTCN PAM
accgccccccaaaguccagg

SEQ ID NO: 31170 - RNA, 20 nt, Artificial Sequence
  spacer sequence CTCN PAM
cccugggggagguagagacg

SEQ ID NO: 31171 - RNA, 20 nt, Artificial Sequence
  spacer sequence CTCN PAM
cccagggugaggccgccagg

SEQ ID NO: 31172 - RNA, 20 nt, Artificial Sequence
  spacer sequence CTCN PAM
accucccccagggugaggcc

SEQ ID NO: 31173 - RNA, 20 nt, Artificial Sequence
  spacer sequence CTCN PAM
cuguggaccuaaagccacca

SEQ ID NO: 31174 - RNA, 20 nt, Artificial Sequence
  spacer sequence CTCN PAM
uucccccuguuacccccgcc

SEQ ID NO: 31175 - RNA, 20 nt, Artificial Sequence
  spacer sequence CTCN PAM
caccggcauuucagauuuuc

SEQ ID NO: 31176 - RNA, 20 nt, Artificial Sequence
  spacer sequence CTCN PAM
gggccaagagaguugaggac

SEQ ID NO: 31177 - RNA, 20 nt, Artificial Sequence
  spacer sequence CTCN PAM
uggcccggagcucacaccgg

SEQ ID NO: 31178 - RNA, 20 nt, Artificial Sequence
  spacer sequence CTCN PAM
cuuggcccggagcucacacc

SEQ ID NO: 31179 - RNA, 20 nt, Artificial Sequence
  spacer sequence CTCN PAM
acucucuuggcccggagcuc

SEQ ID NO: 31180 - RNA, 20 nt, Artificial Sequence
  spacer sequence CTCN PAM
ggaggcaggaaucccccgug

SEQ ID NO: 31181 - RNA, 20 nt, Artificial Sequence
  spacer sequence CTCN PAM
ugaguccucaacucucuugg

SEQ ID NO: 31182 - RNA, 20 nt, Artificial Sequence
  spacer sequence CTCN PAM
aacuuggugugugcucagag

SEQ ID NO: 31183 - RNA, 20 nt, Artificial Sequence
  spacer sequence CTCN PAM
gagaaggcagugguuggagu

SEQ ID NO: 31184 - RNA, 20 nt, Artificial Sequence
  spacer sequence CTCN PAM
gagcacacaccaaguuggag

SEQ ID NO: 31185 - RNA, 20 nt, Artificial Sequence
  spacer sequence CTCN PAM
aaccacugccuucucugagc

SEQ ID NO: 31186 - RNA, 20 nt, Artificial Sequence
  spacer sequence CTCN PAM
ccaccuggcacaggcccugu

SEQ ID NO: 31187 - RNA, 20 nt, Artificial Sequence
  spacer sequence CTCN PAM
ggagcggccugggaagagcu

SEQ ID NO: 31188 - RNA, 20 nt, Artificial Sequence
  spacer sequence CTCN PAM
agaggccaggcugcacaaac

SEQ ID NO: 31189 - RNA, 20 nt, Artificial Sequence
  spacer sequence CTCN PAM
ucccaggccgcuccagaggc

SEQ ID NO: 31190 - RNA, 20 nt, Artificial Sequence
  spacer sequence CTCN PAM
agcucuucccaggccgcucc

SEQ ID NO: 31191 - RNA, 20 nt, Artificial Sequence
  spacer sequence CTCN PAM
cacccugcgaacuccagcuc

SEQ ID NO: 31192 - RNA, 20 nt, Artificial Sequence
  spacer sequence CTCN PAM
cagccacagggcagcuccca

SEQ ID NO: 31193 - RNA, 20 nt, Artificial Sequence
  spacer sequence CTCN PAM
caggugagcggugcuugggg

SEQ ID NO: 31194 - RNA, 20 nt, Artificial Sequence
  spacer sequence CTCN PAM
ccugugagaucaccgccugg

SEQ ID NO: 31195 - RNA, 20 nt, Artificial Sequence
  spacer sequence CTCN PAM
ccaagcaccgcucaccugug

SEQ ID NO: 31196 - RNA, 20 nt, Artificial Sequence
  spacer sequence CTCN PAM
gcgucuccccaagcaccgcu

SEQ ID NO: 31197 - RNA, 20 nt, Artificial Sequence
  spacer sequence CTCN PAM
ugcccgcccacagcuccgcg

SEQ ID NO: 31198 - RNA, 20 nt, Artificial Sequence
  spacer sequence CTCN PAM
acugaccuucuccugcccgc

SEQ ID NO: 31199 - RNA, 20 nt, Artificial Sequence
  spacer sequence CTCN PAM
agccaaaagccaugaccucc

SEQ ID NO: 31200 - RNA, 20 nt, Artificial Sequence
  spacer sequence CTCN PAM
ggccucaagccaaaagccau

SEQ ID NO: 31201 - RNA, 20 nt, Artificial Sequence
  spacer sequence CTCN PAM
ggggguggccgaaugcgccc

SEQ ID NO: 31202 - RNA, 20 nt, Artificial Sequence
  spacer sequence CTCN PAM
aagggcgcauucggccaccc

SEQ ID NO: 31203 - RNA, 20 nt, Artificial Sequence
  spacer sequence CTCN PAM
caaggcagcuccaagggcgc

SEQ ID NO: 31204 - RNA, 20 nt, Artificial Sequence
  spacer sequence CTCN PAM
aagccaagggccuggcuucc

SEQ ID NO: 31205 - RNA, 20 nt, Artificial Sequence
  spacer sequence CTCN PAM
aacccaguggcucuaagcca

SEQ ID NO: 31206 - RNA, 20 nt, Artificial Sequence
  spacer sequence CTCN PAM
aucccuccaacccaguggcu

SEQ ID NO: 31207 - RNA, 20 nt, Artificial Sequence
  spacer sequence CTCN PAM
ucucccagcaccaugggaau

SEQ ID NO: 31208 - RNA, 20 nt, Artificial Sequence
  spacer sequence CTCN PAM
cccagcaccaugggaauggg

SEQ ID NO: 31209 - RNA, 20 nt, Artificial Sequence
  spacer sequence CTCN PAM
cagcaccaugggaaugggag

SEQ ID NO: 31210 - RNA, 20 nt, Artificial Sequence
  spacer sequence CTCN PAM
cauucccauggugcugggag

SEQ ID NO: 31211 - RNA, 20 nt, Artificial Sequence
  spacer sequence CTCN PAM
agcccgguaacucccauucc

SEQ ID NO: 31212 - RNA, 20 nt, Artificial Sequence
  spacer sequence CTCN PAM
uggguugggccccaacgccc

SEQ ID NO: 31213 - RNA, 20 nt, Artificial Sequence
  spacer sequence CTCN PAM
gcccuuccagggcugggcgg

SEQ ID NO: 31214 - RNA, 20 nt, Artificial Sequence
  spacer sequence CTCN PAM
ggggucacuugggacaggug

SEQ ID NO: 31215 - RNA, 20 nt, Artificial Sequence
  spacer sequence CTCN PAM
ccugucccaagugaccccag

SEQ ID NO: 31216 - RNA, 20 nt, Artificial Sequence
  spacer sequence CTCN PAM
cccacccgcugggcugggcu

SEQ ID NO: 31217 - RNA, 20 nt, Artificial Sequence
  spacer sequence CTCN PAM
ccucccccacccgcugggcu

SEQ ID NO: 31218 - RNA, 20 nt, Artificial Sequence
  spacer sequence CTCN PAM
acccucuuucugguucucac

SEQ ID NO: 31219 - RNA, 20 nt, Artificial Sequence
  spacer sequence CTCN PAM
uucugguucucacucccucc

SEQ ID NO: 31220 - RNA, 20 nt, Artificial Sequence
  spacer sequence CTCN PAM
cucccuccauuucucuuucu

SEQ ID NO: 31221 - RNA, 20 nt, Artificial Sequence
  spacer sequence CTCN PAM
cuccauuucucuuucuuuug

SEQ ID NO: 31222 - RNA, 20 nt, Artificial Sequence
  spacer sequence CTCN PAM
auuucucuuucuuuugccuu

SEQ ID NO: 31223 - RNA, 20 nt, Artificial Sequence
  spacer sequence CTCN PAM
uucuuuugccuuucucuauu

SEQ ID NO: 31224 - RNA, 20 nt, Artificial Sequence
  spacer sequence CTCN PAM
auuucugucccgaucucugg

SEQ ID NO: 31225 - RNA, 20 nt, Artificial Sequence
  spacer sequence CTCN PAM
ggcgcucuccccaacccagu

SEQ ID NO: 31226 - RNA, 20 nt, Artificial Sequence
  spacer sequence CTCN PAM
ccccaacccaguaccaccau

SEQ ID NO: 31227 - RNA, 20 nt, Artificial Sequence
  spacer sequence CTCN PAM
ccaacccaguaccaccaucu

SEQ ID NO: 31228 - RNA, 20 nt, Artificial Sequence
  spacer sequence CTCN PAM
gccccuccgucccuccccug

SEQ ID NO: 31229 - RNA, 20 nt, Artificial Sequence
  spacer sequence CTCN PAM
gucccuccccugcuuccgcc

SEQ ID NO: 31230 - RNA, 20 nt, Artificial Sequence
  spacer sequence CTCN PAM
ccugcuuccgcccccucucu

SEQ ID NO: 31231 - RNA, 20 nt, Artificial Sequence
  spacer sequence CTCN PAM
cugggggcccccuucacccc

SEQ ID NO: 31232 - RNA, 20 nt, Artificial Sequence
  spacer sequence CTCN PAM
gggggcccccuucaccccgg

SEQ ID NO: 31233 - RNA, 20 nt, Artificial Sequence
  spacer sequence CTCN PAM
cccgccuugcagucccuccc

SEQ ID NO: 31234 - RNA, 20 nt, Artificial Sequence
  spacer sequence CTCN PAM
cuggagccagcugccuccuc

SEQ ID NO: 31235 - RNA, 20 nt, Artificial Sequence
  spacer sequence CTCN PAM
agggagggacugcaaggcgg

SEQ ID NO: 31236 - RNA, 20 nt, Artificial Sequence
  spacer sequence CTCN PAM
ucgguugccagagcagagag

SEQ ID NO: 31237 - RNA, 20 nt, Artificial Sequence
  spacer sequence CTCN PAM
guugccagagcagagagagu

SEQ ID NO: 31238 - RNA, 20 nt, Artificial Sequence
  spacer sequence CTCN PAM
ggcaaccgaggaggcagcug

SEQ ID NO: 31239 - RNA, 20 nt, Artificial Sequence
  spacer sequence CTCN PAM
gcucuggcaaccgaggaggc

SEQ ID NO: 31240 - RNA, 20 nt, Artificial Sequence
  spacer sequence CTCN PAM
cugcucuggcaaccgaggag

SEQ ID NO: 31241 - RNA, 20 nt, Artificial Sequence
  spacer sequence CTCN PAM
cucugcucuggcaaccgagg

SEQ ID NO: 31242 - RNA, 20 nt, Artificial Sequence
  spacer sequence CTCN PAM
gcccaagcccacucucucug

SEQ ID NO: 31243 - RNA, 20 nt, Artificial Sequence
  spacer sequence CTCN PAM
gaccucggcccaagcccacu

SEQ ID NO: 31244 - RNA, 20 nt, Artificial Sequence
  spacer sequence CTCN PAM
accuccgaccucggcccaag

SEQ ID NO: 31245 - RNA, 20 nt, Artificial Sequence
  spacer sequence CTCN PAM
ucgaccuccgaccucggccc

SEQ ID NO: 31246 - RNA, 20 nt, Artificial Sequence
  spacer sequence CTCN PAM
cgcccgcuccucgaccuccg

SEQ ID NO: 31247 - RNA, 20 nt, Artificial Sequence
  spacer sequence CTCN PAM
caggcucccgcccgcuccuc

SEQ ID NO: 31248 - RNA, 20 nt, Artificial Sequence
  spacer sequence CTCN PAM
ggaauguggguggagcgggg

SEQ ID NO: 31249 - RNA, 20 nt, Artificial Sequence
  spacer sequence CTCN PAM
acccacauuccagagggguu

SEQ ID NO: 31250 - RNA, 20 nt, Artificial Sequence
  spacer sequence CTCN PAM
cuugccccgcuccacccaca

SEQ ID NO: 31251 - RNA, 20 nt, Artificial Sequence
  spacer sequence CTCN PAM
guggaaaccagcugucuccc

SEQ ID NO: 31252 - RNA, 20 nt, Artificial Sequence
  spacer sequence CTCN PAM
gcccugggggagagcaagca

SEQ ID NO: 31253 - RNA, 20 nt, Artificial Sequence
  spacer sequence CTCN PAM
cccagggcugagugugggua

SEQ ID NO: 31254 - RNA, 20 nt, Artificial Sequence
  spacer sequence CTCN PAM
cccccagggcugaguguggg

SEQ ID NO: 31255 - RNA, 20 nt, Artificial Sequence
  spacer sequence CTCN PAM
ugggauggcacccauugguu

SEQ ID NO: 31256 - RNA, 20 nt, Artificial Sequence
  spacer sequence CTCN PAM
acaggccacgcauuuauggg

SEQ ID NO: 31257 - RNA, 20 nt, Artificial Sequence
  spacer sequence CTCN PAM
cagauacacaaccccccccc

SEQ ID NO: 31258 - RNA, 20 nt, Artificial Sequence
  spacer sequence CTCN PAM
auccacugugugacccuaaa

SEQ ID NO: 31259 - RNA, 20 nt, Artificial Sequence
  spacer sequence CTCN PAM
uugcucagccugggccaagg

SEQ ID NO: 31260 - RNA, 20 nt, Artificial Sequence
  spacer sequence CTCN PAM
gccugggccaaggccucccc

SEQ ID NO: 31261 - RNA, 20 nt, Artificial Sequence
  spacer sequence CTCN PAM
ccaaacaaaacuccagccug

SEQ ID NO: 31262 - RNA, 20 nt, Artificial Sequence
  spacer sequence CTCN PAM
agccugcagagucccaccac

SEQ ID NO: 31263 - RNA, 20 nt, Artificial Sequence
  spacer sequence CTCN PAM
gcaggcuggaguuuuguuug

SEQ ID NO: 31264 - RNA, 20 nt, Artificial Sequence
  spacer sequence CTCN PAM
uuguaucuggugacagcugc

SEQ ID NO: 31265 - RNA, 20 nt, Artificial Sequence
  spacer sequence CTCN PAM
guaucuggucagggcccucu

SEQ ID NO: 31266 - RNA, 20 nt, Artificial Sequence
  spacer sequence CTCN PAM
cuguaucuggucagggcccu

SEQ ID NO: 31267 - RNA, 20 nt, Artificial Sequence
  spacer sequence CTCN PAM
agccacagacacucacccac

SEQ ID NO: 31268 - RNA, 20 nt, Artificial Sequence
  spacer sequence CTCN PAM
cccacucaccccucugugca

SEQ ID NO: 31269 - RNA, 20 nt, Artificial Sequence
  spacer sequence CTCN PAM
ccccucugugcaccagugau

SEQ ID NO: 31270 - RNA, 20 nt, Artificial Sequence
  spacer sequence CTCN PAM
gugcaccagugauccuccgc

SEQ ID NO: 31271 - RNA, 20 nt, Artificial Sequence
  spacer sequence CTCN PAM
gcugcccagccaagcuugac

SEQ ID NO: 31272 - RNA, 20 nt, Artificial Sequence
  spacer sequence CTCN PAM
agccugcuggagucugggug

SEQ ID NO: 31273 - RNA, 20 nt, Artificial Sequence
  spacer sequence CTCN PAM
agcaggcuggagucaagcuu

SEQ ID NO: 31274 - RNA, 20 nt, Artificial Sequence
  spacer sequence CTCN PAM
aucccccacccagacuccag

SEQ ID NO: 31275 - RNA, 20 nt, Artificial Sequence
  spacer sequence CTCN PAM
ccaucccccacccagacucc

SEQ ID NO: 31276 - RNA, 20 nt, Artificial Sequence
  spacer sequence CTCN PAM
ccugggaaccccucuccauc

SEQ ID NO: 31277 - RNA, 20 nt, Artificial Sequence
  spacer sequence CTCN PAM
uguuucauuuguauuuccaa

SEQ ID NO: 31278 - RNA, 20 nt, Artificial Sequence
  spacer sequence CTCN PAM
ccuguuucauuuguauuucc

SEQ ID NO: 31279 - RNA, 20 nt, Artificial Sequence
  spacer sequence CTCN PAM
aaacaaaaacaaacaaaaau

SEQ ID NO: 31280 - RNA, 20 nt, Artificial Sequence
  spacer sequence CTCN PAM
gucucaaaacaaaaacaaac

SEQ ID NO: 31281 - RNA, 20 nt, Artificial Sequence
  spacer sequence CTCN PAM
cucugucgcccuggcuggag

SEQ ID NO: 31282 - RNA, 20 nt, Artificial Sequence
  spacer sequence CTCN PAM
gucgcccuggcuggagugca

SEQ ID NO: 31283 - RNA, 20 nt, Artificial Sequence
  spacer sequence CTCN PAM
agccagggcgacagagcgag

SEQ ID NO: 31284 - RNA, 20 nt, Artificial Sequence
  spacer sequence CTCN PAM
gcucaccgcaaccucugccu

SEQ ID NO: 31285 - RNA, 20 nt, Artificial Sequence
  spacer sequence CTCN PAM
ccgcaaccucugccucccgg

SEQ ID NO: 31286 - RNA, 20 nt, Artificial Sequence
  spacer sequence CTCN PAM
gccucccggguucaagugau

SEQ ID NO: 31287 - RNA, 20 nt, Artificial Sequence
  spacer sequence CTCN PAM
cggguucaagugauucuccu

SEQ ID NO: 31288 - RNA, 20 nt, Artificial Sequence
  spacer sequence CTCN PAM
ugccucagccucuggaguag

SEQ ID NO: 31289 - RNA, 20 nt, Artificial Sequence
  spacer sequence CTCN PAM
gccucuggaguagcugggau

SEQ ID NO: 31290 - RNA, 20 nt, Artificial Sequence
  spacer sequence CTCN PAM
ggaguagcugggauuacagg

SEQ ID NO: 31291 - RNA, 20 nt, Artificial Sequence
  spacer sequence CTCN PAM
agaggcugaggcaggagaau

SEQ ID NO: 31292 - RNA, 20 nt, Artificial Sequence
  spacer sequence CTCN PAM
acuaaaaaaauacaaaaauu

SEQ ID NO: 31293 - RNA, 20 nt, Artificial Sequence
  spacer sequence CTCN PAM
aacuccugaucucaagugau

SEQ ID NO: 31294 - RNA, 20 nt, Artificial Sequence
  spacer sequence CTCN PAM
ugaucucaagugaucugccu

SEQ ID NO: 31295 - RNA, 20 nt, Artificial Sequence
  spacer sequence CTCN PAM
agugaucugccugucucggc

SEQ ID NO: 31296 - RNA, 20 nt, Artificial Sequence
  spacer sequence CTCN PAM
gccuccuaaagugcugggau

SEQ ID NO: 31297 - RNA, 20 nt, Artificial Sequence
  spacer sequence CTCN PAM
uaaagugcugggauuacagg

SEQ ID NO: 31298 - RNA, 20 nt, Artificial Sequence
  spacer sequence CTCN PAM
cgccuguaaucccagcacuu

SEQ ID NO: 31299 - RNA, 20 nt, Artificial Sequence
  spacer sequence CTCN PAM
acuaaaaauaaauaaaauug

SEQ ID NO: 31300 - RNA, 20 nt, Artificial Sequence
  spacer sequence CTCN PAM
aacuccugcccucaaaugau

SEQ ID NO: 31301 - RNA, 20 nt, Artificial Sequence
  spacer sequence CTCN PAM
ugcccucaaaugauccaccc

SEQ ID NO: 31302 - RNA, 20 nt, Artificial Sequence
  spacer sequence CTCN PAM
aaugauccacccgcauuggc

SEQ ID NO: 31303 - RNA, 20 nt, Artificial Sequence
  spacer sequence CTCN PAM
caaauugcugggauuacagg

SEQ ID NO: 31304 - RNA, 20 nt, Artificial Sequence
  spacer sequence CTCN PAM
caccuguaaucccagcaauu

SEQ ID NO: 31305 - RNA, 20 nt, Artificial Sequence
  spacer sequence CTCN PAM
aaaauacuaauaacuggggc

SEQ ID NO: 31306 - RNA, 20 nt, Artificial Sequence
  spacer sequence CTCN PAM
cucucuuuccaggcuggaac

SEQ ID NO: 31307 - RNA, 20 nt, Artificial Sequence
  spacer sequence CTCN PAM
cuuuccaggcuggaacgcag

SEQ ID NO: 31308 - RNA, 20 nt, Artificial Sequence
  spacer sequence CTCN PAM
uuccaggcuggaacgcagug

SEQ ID NO: 31309 - RNA, 20 nt, Artificial Sequence
  spacer sequence CTCN PAM
aucacagcucacugcagccu

SEQ ID NO: 31310 - RNA, 20 nt, Artificial Sequence
  spacer sequence CTCN PAM
cugcagccucgcuggaacuc

SEQ ID NO: 31311 - RNA, 20 nt, Artificial Sequence
  spacer sequence CTCN PAM
cuggaacuccugggcucaag

SEQ ID NO: 31312 - RNA, 20 nt, Artificial Sequence
  spacer sequence CTCN PAM
ugggcucaagcgauccuccu

SEQ ID NO: 31313 - RNA, 20 nt, Artificial Sequence
  spacer sequence CTCN PAM
agcgauccuccugccucagc

SEQ ID NO: 31314 - RNA, 20 nt, Artificial Sequence
  spacer sequence CTCN PAM
ugccucagccuccugaguag

SEQ ID NO: 31315 - RNA, 20 nt, Artificial Sequence
  spacer sequence CTCN PAM
gccuccugaguagcugggac

SEQ ID NO: 31316 - RNA, 20 nt, Artificial Sequence
  spacer sequence CTCN PAM
ugaguagcugggacuacagg

SEQ ID NO: 31317 - RNA, 20 nt, Artificial Sequence
  spacer sequence CTCN PAM
ggaggcugaggcaggaggau

SEQ ID NO: 31318 - RNA, 20 nt, Artificial Sequence
  spacer sequence CTCN PAM
ccuguagucccagcuacuca

SEQ ID NO: 31319 - RNA, 20 nt, Artificial Sequence
  spacer sequence CTCN PAM
acaaaaaaaaaaaaaaagca

SEQ ID NO: 31320 - RNA, 20 nt, Artificial Sequence
  spacer sequence CTCN PAM
uggacucaaacgaaagugcu

SEQ ID NO: 31321 - RNA, 20 nt, Artificial Sequence
  spacer sequence CTCN PAM
aacgaaagugcugggauucc

SEQ ID NO: 31322 - RNA, 20 nt, Artificial Sequence
  spacer sequence CTCN PAM
ugccuggaaucccagcacuu

SEQ ID NO: 31323 - RNA, 20 nt, Artificial Sequence
  spacer sequence CTCN PAM
cggccugcauacgggaugau

SEQ ID NO: 31324 - RNA, 20 nt, Artificial Sequence
  spacer sequence CTCN PAM
acgcagcgccaggcuuuccu

SEQ ID NO: 31325 - RNA, 20 nt, Artificial Sequence
  spacer sequence CTCN PAM
aaccccaggaggugcugcug

SEQ ID NO: 31326 - RNA, 20 nt, Artificial Sequence
  spacer sequence CTCN PAM
ugggguuagaggcgcacagg

SEQ ID NO: 31327 - RNA, 20 nt, Artificial Sequence
  spacer sequence CTCN PAM
cagaugaagcagugcggucc

SEQ ID NO: 31328 - RNA, 20 nt, Artificial Sequence
  spacer sequence CTCN PAM
gaugaagcagugcgguccag

SEQ ID NO: 31329 - RNA, 20 nt, Artificial Sequence
  spacer sequence CTCN PAM
ggaccgcacugcuucaucug

SEQ ID NO: 31330 - RNA, 20 nt, Artificial Sequence
  spacer sequence CTCN PAM
cuggaccgcacugcuucauc

SEQ ID NO: 31331 - RNA, 20 nt, Artificial Sequence
  spacer sequence CTCN PAM
cagcugggccccugacccuc

SEQ ID NO: 31332 - RNA, 20 nt, Artificial Sequence
  spacer sequence CTCN PAM
agggacuguggcugagcagc

SEQ ID NO: 31333 - RNA, 20 nt, Artificial Sequence
  spacer sequence CTCN PAM
gccacagucccuggaggguc

SEQ ID NO: 31334 - RNA, 20 nt, Artificial Sequence
  spacer sequence CTCN PAM
aggcacgcuggggcgggcag

SEQ ID NO: 31335 - RNA, 20 nt, Artificial Sequence
  spacer sequence CTCN PAM
ccagcaagaugcaacauagg

SEQ ID NO: 31336 - RNA, 20 nt, Artificial Sequence
  spacer sequence CTCN PAM
agcaagaugcaacauaggug

SEQ ID NO: 31337 - RNA, 20 nt, Artificial Sequence
  spacer sequence CTCN PAM
guagguccugagccccugca

SEQ ID NO: 31338 - RNA, 20 nt, Artificial Sequence
  spacer sequence CTCN PAM
ggaccuacggagugcaagug

SEQ ID NO: 31339 - RNA, 20 nt, Artificial Sequence
  spacer sequence CTCN PAM
caggcagcugcaggggcuca

SEQ ID NO: 31340 - RNA, 20 nt, Artificial Sequence
  spacer sequence CTCN PAM
cccaggcagcugcaggggcu

SEQ ID NO: 31341 - RNA, 20 nt, Artificial Sequence
  spacer sequence CTCN PAM
ccacuugucccacuccacug

SEQ ID NO: 31342 - RNA, 20 nt, Artificial Sequence
  spacer sequence CTCN PAM
acuugucccacuccacuguu

SEQ ID NO: 31343 - RNA, 20 nt, Artificial Sequence
  spacer sequence CTCN PAM
acuguugccauggagauacc

SEQ ID NO: 31344 - RNA, 20 nt, Artificial Sequence
  spacer sequence CTCN PAM
auggcaacaguggaguggga

SEQ ID NO: 31345 - RNA, 20 nt, Artificial Sequence
  spacer sequence CTCN PAM
cacccuaggcagggccaccc

SEQ ID NO: 31346 - RNA, 20 nt, Artificial Sequence
  spacer sequence CTCN PAM
ggguggcccugccuagggug

SEQ ID NO: 31347 - RNA, 20 nt, Artificial Sequence
  spacer sequence CTCN PAM
uugaccucucuguuaggcac

SEQ ID NO: 31348 - RNA, 20 nt, Artificial Sequence
  spacer sequence CTCN PAM
cuguuaggcacaggacgugu

SEQ ID NO: 31349 - RNA, 20 nt, Artificial Sequence
  spacer sequence CTCN PAM
guuaggcacaggacguguag

SEQ ID NO: 31350 - RNA, 20 nt, Artificial Sequence
  spacer sequence CTCN PAM
ugggacuacacguccugugc

SEQ ID NO: 31351 - RNA, 20 nt, Artificial Sequence
  spacer sequence CTCN PAM
caugggacuacacguccugu

SEQ ID NO: 31352 - RNA, 20 nt, Artificial Sequence
  spacer sequence CTCN PAM
accugggcccaguucccucu

SEQ ID NO: 31353 - RNA, 20 nt, Artificial Sequence
  spacer sequence CTCN PAM
gggguaggcggauggaucuc

SEQ ID NO: 31354 - RNA, 20 nt, Artificial Sequence
  spacer sequence CTCN PAM
gauguugcuuagcaacagau

SEQ ID NO: 31355 - RNA, 20 nt, Artificial Sequence
  spacer sequence CTCN PAM
augcagccucagauguugcu

SEQ ID NO: 31356 - RNA, 20 nt, Artificial Sequence
  spacer sequence CTCN PAM
ggagcccccagaccuuuucc

SEQ ID NO: 31357 - RNA, 20 nt, Artificial Sequence
  spacer sequence CTCN PAM
ggagcccccaccuccaugca

SEQ ID NO: 31358 - RNA, 20 nt, Artificial Sequence
  spacer sequence CTCN PAM
ccugcguggacgcuggggau

SEQ ID NO: 31359 - RNA, 20 nt, Artificial Sequence
  spacer sequence CTCN PAM
gucagcuuuaggguguccgu

SEQ ID NO: 31360 - RNA, 20 nt, Artificial Sequence
  spacer sequence CTCN PAM
gcaguauccuguguacugaa

SEQ ID NO: 31361 - RNA, 20 nt, Artificial Sequence
  spacer sequence CTCN PAM
uucaguacacaggauacugc

SEQ ID NO: 31362 - RNA, 20 nt, Artificial Sequence
  spacer sequence CTCN PAM
ggaugccgagugcauggugu

SEQ ID NO: 31363 - RNA, 20 nt, Artificial Sequence
  spacer sequence CTCN PAM
gcauccggagacccugccug

SEQ ID NO: 31364 - RNA, 20 nt, Artificial Sequence
  spacer sequence CTCN PAM
guggcccaggccuggccuuu

SEQ ID NO: 31365 - RNA, 20 nt, Artificial Sequence
  spacer sequence CTCN PAM
ugccccggccaggccauccc

SEQ ID NO: 31366 - RNA, 20 nt, Artificial Sequence
  spacer sequence CTCN PAM
cagccuccacauuccugagc

SEQ ID NO: 31367 - RNA, 20 nt, Artificial Sequence
  spacer sequence CTCN PAM
acauuccugagcugugacuc

SEQ ID NO: 31368 - RNA, 20 nt, Artificial Sequence
  spacer sequence CTCN PAM
ggaauguggaggcugggagg

SEQ ID NO: 31369 - RNA, 20 nt, Artificial Sequence
  spacer sequence CTCN PAM
ggccuguggggaggggguga

SEQ ID NO: 31370 - RNA, 20 nt, Artificial Sequence
  spacer sequence CTCN PAM
ccacaggccugagucacagc

SEQ ID NO: 31371 - RNA, 20 nt, Artificial Sequence
  spacer sequence CTCN PAM
cccccuccccacaggccuga

SEQ ID NO: 31372 - RNA, 20 nt, Artificial Sequence
  spacer sequence CTCN PAM
gaugcguucgcagggugggu

SEQ ID NO: 31373 - RNA, 20 nt, Artificial Sequence
  spacer sequence CTCN PAM
uguuccucggaugcguucgc

SEQ ID NO: 31374 - RNA, 20 nt, Artificial Sequence
  spacer sequence CTCN PAM
guuucccuccuguuccucgg

SEQ ID NO: 31375 - RNA, 20 nt, Artificial Sequence
  spacer sequence CTCN PAM
ccagccucaguuucccuccu

SEQ ID NO: 31376 - RNA, 20 nt, Artificial Sequence
  spacer sequence CTCN PAM
guccggcuuuccuguguagc

SEQ ID NO: 31377 - RNA, 20 nt, Artificial Sequence
  spacer sequence CTCN PAM
ggcccggggguggggcgggg

SEQ ID NO: 31378 - RNA, 20 nt, Artificial Sequence
  spacer sequence CTCN PAM
caggggaccugagaucccag

SEQ ID NO: 31379 - RNA, 20 nt, Artificial Sequence
  spacer sequence CTCN PAM
gguccccugggaggccccgc

SEQ ID NO: 31380 - RNA, 20 nt, Artificial Sequence
  spacer sequence CTCN PAM
gcugggagcugggggaagag

SEQ ID NO: 31381 - RNA, 20 nt, Artificial Sequence
  spacer sequence CTCN PAM
cagcugaguccagggcuggg

SEQ ID NO: 31382 - RNA, 20 nt, Artificial Sequence
  spacer sequence CTCN PAM
ucccccagcucccagcugag

SEQ ID NO: 31383 - RNA, 20 nt, Artificial Sequence
  spacer sequence CTCN PAM
ucugggcuucuggaacucug

SEQ ID NO: 31384 - RNA, 20 nt, Artificial Sequence
  spacer sequence CTCN PAM
gggcugcccugggaggcgcg

SEQ ID NO: 31385 - RNA, 20 nt, Artificial Sequence
  spacer sequence CTCN PAM
cagggcagcccagaguucca

SEQ ID NO: 31386 - RNA, 20 nt, Artificial Sequence
  spacer sequence CTCN PAM
cgcugacacagcacgcgugc

SEQ ID NO: 31387 - RNA, 20 nt, Artificial Sequence
  spacer sequence CTCN PAM
ugucccuggggugggcacgc

SEQ ID NO: 31388 - RNA, 20 nt, Artificial Sequence
  spacer sequence CTCN PAM
gugggucccggcacacccga

SEQ ID NO: 31389 - RNA, 20 nt, Artificial Sequence
  spacer sequence CTCN PAM
ggugugccgggacccacaga

SEQ ID NO: 31390 - RNA, 20 nt, Artificial Sequence
  spacer sequence CTCN PAM
aaagugugcgcuuauccgga

SEQ ID NO: 31391 - RNA, 20 nt, Artificial Sequence
  spacer sequence CTCN PAM
uuggguugcacacacagcgc

SEQ ID NO: 31392 - RNA, 20 nt, Artificial Sequence
  spacer sequence CTCN PAM
gugcacacaccuccaagacu

SEQ ID NO: 31393 - RNA, 20 nt, Artificial Sequence
  spacer sequence CTCN PAM
aagacugcgugcacgccccu

SEQ ID NO: 31394 - RNA, 20 nt, Artificial Sequence
  spacer sequence CTCN PAM
ccacgccgugugcacucgca

SEQ ID NO: 31395 - RNA, 20 nt, Artificial Sequence
  spacer sequence CTCN PAM
cacauagcuacacauucgug

SEQ ID NO: 31396 - RNA, 20 nt, Artificial Sequence
  spacer sequence CTCN PAM
guacucugcccacgggcaca

SEQ ID NO: 31397 - RNA, 20 nt, Artificial Sequence
  spacer sequence CTCN PAM
gcccacgggcacacaugugc

SEQ ID NO: 31398 - RNA, 20 nt, Artificial Sequence
  spacer sequence CTCN PAM
gcaucccccacccuggcucu

SEQ ID NO: 31399 - RNA, 20 nt, Artificial Sequence
  spacer sequence CTCN PAM
gggccccgcguaguggggcc

SEQ ID NO: 31400 - RNA, 20 nt, Artificial Sequence
  spacer sequence CTCN PAM
gccaggacgguccuauuucu

SEQ ID NO: 31401 - RNA, 20 nt, Artificial Sequence
  spacer sequence CTCN PAM
uagccaggcgggggccggga

SEQ ID NO: 31402 - RNA, 20 nt, Artificial Sequence
  spacer sequence CTCN PAM
uccuagccaggcgggggccg

SEQ ID NO: 31403 - RNA, 20 nt, Artificial Sequence
  spacer sequence CTCN PAM
gccacgcccgucgcaggccu

SEQ ID NO: 31404 - RNA, 20 nt, Artificial Sequence
  spacer sequence CTCN PAM
cuaccgccucccgcccgguc

SEQ ID NO: 31405 - RNA, 20 nt, Artificial Sequence
  spacer sequence CTCN PAM
accgccucccgcccggucau

SEQ ID NO: 31406 - RNA, 20 nt, Artificial Sequence
  spacer sequence CTCN PAM
cgcccggucauuagucgggg

SEQ ID NO: 31407 - RNA, 20 nt, Artificial Sequence
  spacer sequence CTCN PAM
cccgaccccgacuaaugacc

SEQ ID NO: 31408 - RNA, 20 nt, Artificial Sequence
  spacer sequence CTCN PAM
ccacggggccccgcccgccg

SEQ ID NO: 31409 - RNA, 20 nt, Artificial Sequence
  spacer sequence CTCN PAM
gcccuccccacggggccccg

SEQ ID NO: 31410 - RNA, 20 nt, Artificial Sequence
  spacer sequence CTCN PAM
cgcaccgcccacuccgcccu

SEQ ID NO: 31411 - RNA, 20 nt, Artificial Sequence
  spacer sequence CTCN PAM
cucccgcaccgcccacuccg

SEQ ID NO: 31412 - RNA, 20 nt, Artificial Sequence
  spacer sequence CTCN PAM
cucgcucccgcaccgcccac

SEQ ID NO: 31413 - RNA, 20 nt, Artificial Sequence
  spacer sequence CTCN PAM
gcccucgucuccauggcgac

SEQ ID NO: 31414 - RNA, 20 nt, Artificial Sequence
  spacer sequence CTCN PAM
ucuccauggcgacgccccgc

SEQ ID NO: 31415 - RNA, 20 nt, Artificial Sequence
  spacer sequence CTCN PAM
auggcgacgccccgcagggg

SEQ ID NO: 31416 - RNA, 20 nt, Artificial Sequence
  spacer sequence CTCN PAM
ccugcggggcgucgccaugg

SEQ ID NO: 31417 - RNA, 20 nt, Artificial Sequence
  spacer sequence CTCN PAM
uccccugcggggcgucgcca

SEQ ID NO: 31418 - RNA, 20 nt, Artificial Sequence
  spacer sequence CTCN PAM
cgggccuccuccccugcggg

SEQ ID NO: 31419 - RNA, 20 nt, Artificial Sequence
  spacer sequence CTCN PAM
ucccgggccuccuccccugc

SEQ ID NO: 31420 - RNA, 20 nt, Artificial Sequence
  spacer sequence CTCN PAM
ugcacccugauacuccuccc

SEQ ID NO: 31421 - RNA, 20 nt, Artificial Sequence
  spacer sequence CTCN PAM
gaaggggcgcgcaccuccug

SEQ ID NO: 31422 - RNA, 20 nt, Artificial Sequence
  spacer sequence CTCN PAM
ccgcgcgucugucuugggcc

SEQ ID NO: 31423 - RNA, 20 nt, Artificial Sequence
  spacer sequence CTCN PAM
gacugauccccgcgccucgc

SEQ ID NO: 31424 - RNA, 20 nt, Artificial Sequence
  spacer sequence CTCN PAM
ccgggcaggggcgagccccg

SEQ ID NO: 31425 - RNA, 20 nt, Artificial Sequence
  spacer sequence CTCN PAM
ccccugcccggcgaggcgcg

SEQ ID NO: 31426 - RNA, 20 nt, Artificial Sequence
  spacer sequence CTCN PAM
cccccgcccggcgcggcuau

SEQ ID NO: 31427 - RNA, 20 nt, Artificial Sequence
  spacer sequence CTCN PAM
aaauagccgcgccgggcggg

SEQ ID NO: 31428 - RNA, 20 nt, Artificial Sequence
  spacer sequence CTCN PAM
uccguuggggccgaggcgcg

SEQ ID NO: 31429 - RNA, 20 nt, Artificial Sequence
  spacer sequence CTCN PAM
guuggggccgaggcgcgggg

SEQ ID NO: 31430 - RNA, 20 nt, Artificial Sequence
  spacer sequence CTCN PAM
gccccaacggaggagcucaa

SEQ ID NO: 31431 - RNA, 20 nt, Artificial Sequence
  spacer sequence CTCN PAM
cgccgcccccgcgccucggc

SEQ ID NO: 31432 - RNA, 20 nt, Artificial Sequence
  spacer sequence CTCN PAM
ccccgcgagauuggaccccu

SEQ ID NO: 31433 - RNA, 20 nt, Artificial Sequence
  spacer sequence CTCN PAM
cggggcgaggacgcagccug

SEQ ID NO: 31434 - RNA, 20 nt, Artificial Sequence
  spacer sequence CTCN PAM
aggacugugcgcuguggccg

SEQ ID NO: 31435 - RNA, 20 nt, Artificial Sequence
  spacer sequence CTCN PAM
agggguccaaucucgcgggg

SEQ ID NO: 31436 - RNA, 20 nt, Artificial Sequence
  spacer sequence CTCN PAM
cccacgcgaggcgucugcgu

SEQ ID NO: 31437 - RNA, 20 nt, Artificial Sequence
  spacer sequence CTCN PAM
cacgcgaggcgucugcgugg

SEQ ID NO: 31438 - RNA, 20 nt, Artificial Sequence
  spacer sequence CTCN PAM
cgugggagagggggccccgc

SEQ ID NO: 31439 - RNA, 20 nt, Artificial Sequence
  spacer sequence CTCN PAM
acgcagacgccucgcguggg

SEQ ID NO: 31440 - RNA, 20 nt, Artificial Sequence
  spacer sequence CTCN PAM
cggugccgccgcuccacgca

SEQ ID NO: 31441 - RNA, 20 nt, Artificial Sequence
  spacer sequence CTCN PAM
agccaaacgccgcggacgga

SEQ ID NO: 31442 - RNA, 20 nt, Artificial Sequence
  spacer sequence CTCN PAM
agcggccgggcucccggugc

SEQ ID NO: 31443 - RNA, 20 nt, Artificial Sequence
  spacer sequence CTCN PAM
guccgcggcguuuggcucga

SEQ ID NO: 31444 - RNA, 20 nt, Artificial Sequence
  spacer sequence CTCN PAM
cuccguccgcggcguuuggc

SEQ ID NO: 31445 - RNA, 20 nt, Artificial Sequence
  spacer sequence CTCN PAM
ggcggcugggaccccuucau

SEQ ID NO: 31446 - RNA, 20 nt, Artificial Sequence
  spacer sequence CTCN PAM
ccgcgauccuguguccccac

SEQ ID NO: 31447 - RNA, 20 nt, Artificial Sequence
  spacer sequence CTCN PAM
cagguaucucaccgcgaucc

SEQ ID NO: 31448 - RNA, 20 nt, Artificial Sequence
  spacer sequence CTCN PAM
cagacgcagcugaccccaga

SEQ ID NO: 31449 - RNA, 20 nt, Artificial Sequence
  spacer sequence CTCN PAM
ggggucagcugcgucugcga

SEQ ID NO: 31450 - RNA, 20 nt, Artificial Sequence
  spacer sequence CTCN PAM
gcacagaugcaaagcggcag

SEQ ID NO: 31451 - RNA, 20 nt, Artificial Sequence
  spacer sequence CTCN PAM
cggagcccgcacccaggaac

SEQ ID NO: 31452 - RNA, 20 nt, Artificial Sequence
  spacer sequence CTCN PAM
gugaguguccgcagccaucc

SEQ ID NO: 31453 - RNA, 20 nt, Artificial Sequence
  spacer sequence CTCN PAM
uaguaagcgcuuaauaacua

SEQ ID NO: 31454 - RNA, 20 nt, Artificial Sequence
  spacer sequence CTCN PAM
gccuuuuccugguuuugcga

SEQ ID NO: 31455 - RNA, 20 nt, Artificial Sequence
  spacer sequence CTCN PAM
cagaaccagggaacgauggg

SEQ ID NO: 31456 - RNA, 20 nt, Artificial Sequence
  spacer sequence CTCN PAM
ccccagcccaucguucccug

SEQ ID NO: 31457 - RNA, 20 nt, Artificial Sequence
  spacer sequence CTCN PAM
aacucccccccuacaagggc

SEQ ID NO: 31458 - RNA, 20 nt, Artificial Sequence
  spacer sequence CTCN PAM
cccccuacaagggcugcucu

SEQ ID NO: 31459 - RNA, 20 nt, Artificial Sequence
  spacer sequence CTCN PAM
gggucagagaacguccaccg

SEQ ID NO: 31460 - RNA, 20 nt, Artificial Sequence
  spacer sequence CTCN PAM
gacccagagcagcccuugua

SEQ ID NO: 31461 - RNA, 20 nt, Artificial Sequence
  spacer sequence CTCN PAM
caggcugggcauguggcgcc

SEQ ID NO: 31462 - RNA, 20 nt, Artificial Sequence
  spacer sequence CTCN PAM
aguggguggguggccccucc

SEQ ID NO: 31463 - RNA, 20 nt, Artificial Sequence
  spacer sequence CTCN PAM
cgcauggacggcgggcgcag

SEQ ID NO: 31464 - RNA, 20 nt, Artificial Sequence
  spacer sequence CTCN PAM
ccugcgcccgccguccaugc

SEQ ID NO: 31465 - RNA, 20 nt, Artificial Sequence
  spacer sequence CTCN PAM
gugcugaugucucucuccuu

SEQ ID NO: 31466 - RNA, 20 nt, Artificial Sequence
  spacer sequence CTCN PAM
cuccuuuaauaaccacccug

SEQ ID NO: 31467 - RNA, 20 nt, Artificial Sequence
  spacer sequence CTCN PAM
ccuuuaauaaccacccugcg

SEQ ID NO: 31468 - RNA, 20 nt, Artificial Sequence
  spacer sequence CTCN PAM
uuuaauaaccacccugcgug

SEQ ID NO: 31469 - RNA, 20 nt, Artificial Sequence
  spacer sequence CTCN PAM
cgcagggugguuauuaaagg

SEQ ID NO: 31470 - RNA, 20 nt, Artificial Sequence
  spacer sequence CTCN PAM
ccgucagcggcagccggcug

SEQ ID NO: 31471 - RNA, 20 nt, Artificial Sequence
  spacer sequence CTCN PAM
ggcccccccacuacagccgc

SEQ ID NO: 31472 - RNA, 20 nt, Artificial Sequence
  spacer sequence CTCN PAM
gcaccucgggcccccccacu

SEQ ID NO: 31473 - RNA, 20 nt, Artificial Sequence
  spacer sequence CTCN PAM
cccaggcagcagcuguguga

SEQ ID NO: 31474 - RNA, 20 nt, Artificial Sequence
  spacer sequence CTCN PAM
agacccccucccccaggcag

SEQ ID NO: 31475 - RNA, 20 nt, Artificial Sequence
  spacer sequence CTCN PAM
ugggcucaagacccccuccc

SEQ ID NO: 31476 - RNA, 20 nt, Artificial Sequence
  spacer sequence CTCN PAM
gggaccccucaugggcucaa

SEQ ID NO: 31477 - RNA, 20 nt, Artificial Sequence
  spacer sequence CTCN PAM
agugacaaggucucugggac

SEQ ID NO: 31478 - RNA, 20 nt, Artificial Sequence
  spacer sequence CTCN PAM
auccacuugaggguggaagu

SEQ ID NO: 31479 - RNA, 20 nt, Artificial Sequence
  spacer sequence CTCN PAM
aguggaucgaggugggggua

SEQ ID NO: 31480 - RNA, 20 nt, Artificial Sequence
  spacer sequence CTCN PAM
cuuccacccucaaguggauc

SEQ ID NO: 31481 - RNA, 20 nt, Artificial Sequence
  spacer sequence CTCN PAM
gacucacuuccacccucaag

SEQ ID NO: 31482 - RNA, 20 nt, Artificial Sequence
  spacer sequence CTCN PAM
ugaccucagacucacuucca

SEQ ID NO: 31483 - RNA, 20 nt, Artificial Sequence
  spacer sequence CTCN PAM
ucccagggaaaucccggccc

SEQ ID NO: 31484 - RNA, 20 nt, Artificial Sequence
  spacer sequence CTCN PAM
guacgccaacuucccccagc

SEQ ID NO: 31485 - RNA, 20 nt, Artificial Sequence
  spacer sequence CTCN PAM
gcugacaagcugggggaagu

SEQ ID NO: 31486 - RNA, 20 nt, Artificial Sequence
  spacer sequence CTCN PAM
gaagacuuucuggggcagag

SEQ ID NO: 31487 - RNA, 20 nt, Artificial Sequence
  spacer sequence CTCN PAM
gccccagaaagucuucggag

SEQ ID NO: 31488 - RNA, 20 nt, Artificial Sequence
  spacer sequence CTCN PAM
cugccccagaaagucuucgg

SEQ ID NO: 31489 - RNA, 20 nt, Artificial Sequence
  spacer sequence CTCN PAM
cccagcccugguggaagaag

SEQ ID NO: 31490 - RNA, 20 nt, Artificial Sequence
  spacer sequence CTCN PAM
ugccgccgccucccccagcc

SEQ ID NO: 31491 - RNA, 20 nt, Artificial Sequence
  spacer sequence CTCN PAM
ugggcgaggagcaaguggug

SEQ ID NO: 31492 - RNA, 20 nt, Artificial Sequence
  spacer sequence CTCN PAM
cccaggagucaucucaugcc

SEQ ID NO: 31493 - RNA, 20 nt, Artificial Sequence
  spacer sequence CTCN PAM
ucgcccaggagucaucucau

SEQ ID NO: 31494 - RNA, 20 nt, Artificial Sequence
  spacer sequence CTCN PAM
auggccaccacuugcuccuc

SEQ ID NO: 31495 - RNA, 20 nt, Artificial Sequence
  spacer sequence CTCN PAM
ggggggcccucuauggccac

SEQ ID NO: 31496 - RNA, 20 nt, Artificial Sequence
  spacer sequence CTCN PAM
ucggcggccccaaagccucu

SEQ ID NO: 31497 - RNA, 20 nt, Artificial Sequence
  spacer sequence CTCN PAM
cuacucuucggcggccccaa

SEQ ID NO: 31498 - RNA, 20 nt, Artificial Sequence
  spacer sequence CTCN PAM
cucacuacucuucggcggcc

SEQ ID NO: 31499 - RNA, 20 nt, Artificial Sequence
  spacer sequence CTCN PAM
agauggcggcggcuuuaaga

SEQ ID NO: 31500 - RNA, 20 nt, Artificial Sequence
  spacer sequence CTCN PAM
ccuccgccaaccaggcucag

SEQ ID NO: 31501 - RNA, 20 nt, Artificial Sequence
  spacer sequence CTCN PAM
gccaaccaggcucaguaggg

SEQ ID NO: 31502 - RNA, 20 nt, Artificial Sequence
  spacer sequence CTCN PAM
guaggggaggccuguggaag

SEQ ID NO: 31503 - RNA, 20 nt, Artificial Sequence
  spacer sequence CTCN PAM
ccuacugagccugguuggcg

SEQ ID NO: 31504 - RNA, 20 nt, Artificial Sequence
  spacer sequence CTCN PAM
uuccacaggccuccccuacu

SEQ ID NO: 31505 - RNA, 20 nt, Artificial Sequence
  spacer sequence CTCN PAM
ccuuccacaggccuccccua

SEQ ID NO: 31506 - RNA, 20 nt, Artificial Sequence
  spacer sequence CTCN PAM
acccaggccuuuucucuccu

SEQ ID NO: 31507 - RNA, 20 nt, Artificial Sequence
  spacer sequence CTCN PAM
uccacccaggccuuuucucu

SEQ ID NO: 31508 - RNA, 20 nt, Artificial Sequence
  spacer sequence CTCN PAM
gcuccuccacccaggccuuu

SEQ ID NO: 31509 - RNA, 20 nt, Artificial Sequence
  spacer sequence CTCN PAM
ccacgcggggccaggcccac

SEQ ID NO: 31510 - RNA, 20 nt, Artificial Sequence
  spacer sequence CTCN PAM
cuccccacgcggggccaggc

SEQ ID NO: 31511 - RNA, 20 nt, Artificial Sequence
  spacer sequence CTCN PAM
caccgugcugcacagcaacg

SEQ ID NO: 31512 - RNA, 20 nt, Artificial Sequence
  spacer sequence CTCN PAM
ccucccaccgugcugcacag

SEQ ID NO: 31513 - RNA, 20 nt, Artificial Sequence
  spacer sequence CTCN PAM
gccuccccucccaccgugcu

SEQ ID NO: 31514 - RNA, 20 nt, Artificial Sequence
  spacer sequence CTCN PAM
gcccggcccucggccucccc

SEQ ID NO: 31515 - RNA, 20 nt, Artificial Sequence
  spacer sequence CTCN PAM
ggguguccgccugcacccga

SEQ ID NO: 31516 - RNA, 20 nt, Artificial Sequence
  spacer sequence CTCN PAM
ccuggccggauaguguugug

SEQ ID NO: 31517 - RNA, 20 nt, Artificial Sequence
  spacer sequence CTCN PAM
cacuggaaccgcgauuauca

SEQ ID NO: 31518 - RNA, 20 nt, Artificial Sequence
  spacer sequence CTCN PAM
aacccgcacccaagccuaac

SEQ ID NO: 31519 - RNA, 20 nt, Artificial Sequence
  spacer sequence CTCN PAM
guugggguuuuggugggcau

SEQ ID NO: 31520 - RNA, 20 nt, Artificial Sequence
  spacer sequence CTCN PAM
auuccugccaucaaccccau

SEQ ID NO: 31521 - RNA, 20 nt, Artificial Sequence
  spacer sequence CTCN PAM
agcagucccgacauaacaac

SEQ ID NO: 31522 - RNA, 20 nt, Artificial Sequence
  spacer sequence CTCN PAM
uggggacuucugggugucac

SEQ ID NO: 31523 - RNA, 20 nt, Artificial Sequence
  spacer sequence CTCN PAM
ggccucauggggacuucugg

SEQ ID NO: 31524 - RNA, 20 nt, Artificial Sequence
  spacer sequence CTCN PAM
agccccgauucccaggccuc

SEQ ID NO: 31525 - RNA, 20 nt, Artificial Sequence
  spacer sequence CTCN PAM
cuggccugcggcggggaaca

SEQ ID NO: 31526 - RNA, 20 nt, Artificial Sequence
  spacer sequence CTCN PAM
agcgcggguggaggacugcg

SEQ ID NO: 31527 - RNA, 20 nt, Artificial Sequence
  spacer sequence CTCN PAM
agggggcgugaccagcgcgc

SEQ ID NO: 31528 - RNA, 20 nt, Artificial Sequence
  spacer sequence CTCN PAM
acccgcgcucgagggggcgu

SEQ ID NO: 31529 - RNA, 20 nt, Artificial Sequence
  spacer sequence CTCN PAM
gccaauagucgagcccgaca

SEQ ID NO: 31530 - RNA, 20 nt, Artificial Sequence
  spacer sequence CTCN PAM
acuauuggccgagacguuug

SEQ ID NO: 31531 - RNA, 20 nt, Artificial Sequence
  spacer sequence CTCN PAM
cgcggacuggugucgggcuc

SEQ ID NO: 31532 - RNA, 20 nt, Artificial Sequence
  spacer sequence CTCN PAM
guuccgcccccucccgcgga

SEQ ID NO: 31533 - RNA, 20 nt, Artificial Sequence
  spacer sequence CTCN PAM
gcccccagcucaugaauaua

SEQ ID NO: 31534 - RNA, 20 nt, Artificial Sequence
  spacer sequence CTCN PAM
ugaauauaagacgcaggcgc

SEQ ID NO: 31535 - RNA, 20 nt, Artificial Sequence
  spacer sequence CTCN PAM
gauuggcccaggauguguag

SEQ ID NO: 31536 - RNA, 20 nt, Artificial Sequence
  spacer sequence CTCN PAM
gggacgccccccccucacuc

SEQ ID NO: 31537 - RNA, 20 nt, Artificial Sequence
  spacer sequence CTCN PAM
cucgcgcguuaggaggcucg

SEQ ID NO: 31538 - RNA, 20 nt, Artificial Sequence
  spacer sequence CTCN PAM
cgcguuaggaggcucggguc

SEQ ID NO: 31539 - RNA, 20 nt, Artificial Sequence
  spacer sequence CTCN PAM
uaacgcgcgagugagggggg

SEQ ID NO: 31540 - RNA, 20 nt, Artificial Sequence
  spacer sequence CTCN PAM
ggucguuguggugcgcuguc

SEQ ID NO: 31541 - RNA, 20 nt, Artificial Sequence
  spacer sequence CTCN PAM
guggugagggcccuggcugc

SEQ ID NO: 31542 - RNA, 20 nt, Artificial Sequence
  spacer sequence CTCN PAM
ccacugagucgggcaggucc

SEQ ID NO: 31543 - RNA, 20 nt, Artificial Sequence
  spacer sequence CTCN PAM
gaggagcucggggcggcggg

SEQ ID NO: 31544 - RNA, 20 nt, Artificial Sequence
  spacer sequence CTCN PAM
gagccggugcagccagggcc

SEQ ID NO: 31545 - RNA, 20 nt, Artificial Sequence
  spacer sequence CTCN PAM
ucggagccggugcagccagg

SEQ ID NO: 31546 - RNA, 20 nt, Artificial Sequence
  spacer sequence CTCN PAM
gggcggcgggcggccugcgg

SEQ ID NO: 31547 - RNA, 20 nt, Artificial Sequence
  spacer sequence CTCN PAM
ccuggccgccgcaggccgcc

SEQ ID NO: 31548 - RNA, 20 nt, Artificial Sequence
  spacer sequence CTCN PAM
caggggcgugccgcugcggc

SEQ ID NO: 31549 - RNA, 20 nt, Artificial Sequence
  spacer sequence CTCN PAM
accccgggcccgcccccucc

SEQ ID NO: 31550 - RNA, 20 nt, Artificial Sequence
  spacer sequence CTCN PAM
ccgccggcggggcggacucc

SEQ ID NO: 31551 - RNA, 20 nt, Artificial Sequence
  spacer sequence CTCN PAM
cgcugucccucgccgccggc

SEQ ID NO: 31552 - RNA, 20 nt, Artificial Sequence
  spacer sequence CTCN PAM
gcccaaucucccgcuguccc

SEQ ID NO: 31553 - RNA, 20 nt, Artificial Sequence
  spacer sequence CTCN PAM
ggccgcuacucggcccaauc

SEQ ID NO: 31554 - RNA, 20 nt, Artificial Sequence
  spacer sequence CTCN PAM
ccccgccgguccgggccgcc

SEQ ID NO: 31555 - RNA, 20 nt, Artificial Sequence
  spacer sequence CTCN PAM
ccgccgguccgggccgccgg

SEQ ID NO: 31556 - RNA, 20 nt, Artificial Sequence
  spacer sequence CTCN PAM
cggccgccauuuugcggcgg

SEQ ID NO: 31557 - RNA, 20 nt, Artificial Sequence
  spacer sequence CTCN PAM
aggcugugcccagcgaaaug

SEQ ID NO: 31558 - RNA, 20 nt, Artificial Sequence
  spacer sequence CTCN PAM
agcucgcggccgccauuuug

SEQ ID NO: 31559 - RNA, 20 nt, Artificial Sequence
  spacer sequence CTCN PAM
cgccauuucgcugggcacag

SEQ ID NO: 31560 - RNA, 20 nt, Artificial Sequence
  spacer sequence CTCN PAM
gcgcucccgccauuucgcug

SEQ ID NO: 31561 - RNA, 20 nt, Artificial Sequence
  spacer sequence CTCN PAM
auccgggaacucggcgcucc

SEQ ID NO: 31562 - RNA, 20 nt, Artificial Sequence
  spacer sequence CTCN PAM
agggccgcuuucccggccuu

SEQ ID NO: 31563 - RNA, 20 nt, Artificial Sequence
  spacer sequence CTCN PAM
agccccaaggccgggaaagc

SEQ ID NO: 31564 - RNA, 20 nt, Artificial Sequence
  spacer sequence CTCN PAM
guaagcaaaagcguuggugu

SEQ ID NO: 31565 - RNA, 20 nt, Artificial Sequence
  spacer sequence CTCN PAM
uuuucccauugcgauugcau

SEQ ID NO: 31566 - RNA, 20 nt, Artificial Sequence
  spacer sequence CTCN PAM
ugcaaucgcaaugggaaaag

SEQ ID NO: 31567 - RNA, 20 nt, Artificial Sequence
  spacer sequence CTCN PAM
uaaaucuuggguaggcgugg

SEQ ID NO: 31568 - RNA, 20 nt, Artificial Sequence
  spacer sequence CTCN PAM
ucugccacgucgugcuuugc

SEQ ID NO: 31569 - RNA, 20 nt, Artificial Sequence
  spacer sequence CTCN PAM
cagugccagacuuccaaguc

SEQ ID NO: 31570 - RNA, 20 nt, Artificial Sequence
  spacer sequence CTCN PAM
gagccacuggguggcggcca

SEQ ID NO: 31571 - RNA, 20 nt, Artificial Sequence
  spacer sequence CTCN PAM
gagaacuagacuuggaaguc

SEQ ID NO: 31572 - RNA, 20 nt, Artificial Sequence
  spacer sequence CTCN PAM
uaaaugccacuuccccugcc

SEQ ID NO: 31573 - RNA, 20 nt, Artificial Sequence
  spacer sequence CTCN PAM
gggcagguacugacuuccau

SEQ ID NO: 31574 - RNA, 20 nt, Artificial Sequence
  spacer sequence CTCN PAM
cugacagccagccccccccc

SEQ ID NO: 31575 - RNA, 20 nt, Artificial Sequence
  spacer sequence CTCN PAM
ggaggcauuuuacagugagc

SEQ ID NO: 31576 - RNA, 20 nt, Artificial Sequence
  spacer sequence CTCN PAM
ugagacuggggggggggcug

SEQ ID NO: 31577 - RNA, 20 nt, Artificial Sequence
  spacer sequence CTCN PAM
cuguaaaaugccuccugaga

SEQ ID NO: 31578 - RNA, 20 nt, Artificial Sequence
  spacer sequence CTCN PAM
uacccuaaccaacugacauc

SEQ ID NO: 31579 - RNA, 20 nt, Artificial Sequence
  spacer sequence CTCN PAM
uauuuccgaacgggugccaa

SEQ ID NO: 31580 - RNA, 20 nt, Artificial Sequence
  spacer sequence CTCN PAM
gguucuccuauuuccgaacg

SEQ ID NO: 31581 - RNA, 20 nt, Artificial Sequence
  spacer sequence CTCN PAM
cagguucuccuauuuccgaa

SEQ ID NO: 31582 - RNA, 20 nt, Artificial Sequence
  spacer sequence CTCN PAM
cuucccccacagccuuccag

SEQ ID NO: 31583 - RNA, 20 nt, Artificial Sequence
  spacer sequence CTCN PAM
auccacccccaagacugaag

SEQ ID NO: 31584 - RNA, 20 nt, Artificial Sequence
  spacer sequence CTCN PAM
caccuguaaucccaaaacuu

SEQ ID NO: 31585 - RNA, 20 nt, Artificial Sequence
  spacer sequence CTCN PAM
caccuuggccacccaaaguu

SEQ ID NO: 31586 - RNA, 20 nt, Artificial Sequence
  spacer sequence CTCN PAM
agcaauccucccaccuuggc

SEQ ID NO: 31587 - RNA, 20 nt, Artificial Sequence
  spacer sequence CTCN PAM
ugggcucaagcaauccuccc

SEQ ID NO: 31588 - RNA, 20 nt, Artificial Sequence
  spacer sequence CTCN PAM
guugcccaggcuggucugaa

SEQ ID NO: 31589 - RNA, 20 nt, Artificial Sequence
  spacer sequence CTCN PAM
acuaaaacaaauuuaaaaaa

SEQ ID NO: 31590 - RNA, 20 nt, Artificial Sequence
  spacer sequence CTCN PAM
caagaaacugggacuguagg

SEQ ID NO: 31591 - RNA, 20 nt, Artificial Sequence
  spacer sequence CTCN PAM
gccucccaagaaacugggac

SEQ ID NO: 31592 - RNA, 20 nt, Artificial Sequence
  spacer sequence CTCN PAM
uaccucagccucccaagaaa

SEQ ID NO: 31593 - RNA, 20 nt, Artificial Sequence
  spacer sequence CTCN PAM
agcaauccuccuaccucagc

SEQ ID NO: 31594 - RNA, 20 nt, Artificial Sequence
  spacer sequence CTCN PAM
ugggcucaagcaauccuccu

SEQ ID NO: 31595 - RNA, 20 nt, Artificial Sequence
  spacer sequence CTCN PAM
accuccugggcucaagcaau

SEQ ID NO: 31596 - RNA, 20 nt, Artificial Sequence
  spacer sequence CTCN PAM
agucugggugacaguuagac

SEQ ID NO: 31597 - RNA, 20 nt, Artificial Sequence
  spacer sequence CTCN PAM
uaccuaggacuuauuuuuuu

SEQ ID NO: 31598 - RNA, 20 nt, Artificial Sequence
  spacer sequence CTCN PAM
aacucauaccuaggacuuau

SEQ ID NO: 31599 - RNA, 20 nt, Artificial Sequence
  spacer sequence CTCN PAM
ccgcuuccuauuuuauguaa

SEQ ID NO: 31600 - RNA, 20 nt, Artificial Sequence
  spacer sequence CTCN PAM
ccccgcuuccuauuuuaugu

SEQ ID NO: 31601 - RNA, 20 nt, Artificial Sequence
  spacer sequence CTCN PAM
ccaccucuccccgcuuccua

SEQ ID NO: 31602 - RNA, 20 nt, Artificial Sequence
  spacer sequence CTCN PAM
caccaccucuccccgcuucc

SEQ ID NO: 31603 - RNA, 20 nt, Artificial Sequence
  spacer sequence CTCN PAM
acaggggucaucucucacca

SEQ ID NO: 31604 - RNA, 20 nt, Artificial Sequence
  spacer sequence CTCN PAM
aacaaaaaguuugccuucau

SEQ ID NO: 31605 - RNA, 20 nt, Artificial Sequence
  spacer sequence CTCN PAM
gcccuccaacaaaaaguuug

SEQ ID NO: 31606 - RNA, 20 nt, Artificial Sequence
  spacer sequence CTCN PAM
uuggugucaaaacucagccc

SEQ ID NO: 31607 - RNA, 20 nt, Artificial Sequence
  spacer sequence CTCN PAM
agcgacugcucauugguguc

SEQ ID NO: 31608 - RNA, 20 nt, Artificial Sequence
  spacer sequence CTCN PAM
aaguacggacagaucucuga

SEQ ID NO: 31609 - RNA, 20 nt, Artificial Sequence
  spacer sequence CTCN PAM
gaaggugaggcugcugcugg

SEQ ID NO: 31610 - RNA, 20 nt, Artificial Sequence
  spacer sequence CTCN PAM
ccuucagagaucuguccgua

SEQ ID NO: 31611 - RNA, 20 nt, Artificial Sequence
  spacer sequence CTCN PAM
uccuaccuggaaguacagcu

SEQ ID NO: 31612 - RNA, 20 nt, Artificial Sequence
  spacer sequence CTCN PAM
uaccuggaaguacagcuggg

SEQ ID NO: 31613 - RNA, 20 nt, Artificial Sequence
  spacer sequence CTCN PAM
cuccccugcacagugguggu

SEQ ID NO: 31614 - RNA, 20 nt, Artificial Sequence
  spacer sequence CTCN PAM
ccccugcacaguggugguug

SEQ ID NO: 31615 - RNA, 20 nt, Artificial Sequence
  spacer sequence CTCN PAM
ccugcacaguggugguugug

SEQ ID NO: 31616 - RNA, 20 nt, Artificial Sequence
  spacer sequence CTCN PAM
cugucuuucacaaccaccac

SEQ ID NO: 31617 - RNA, 20 nt, Artificial Sequence
  spacer sequence CTCN PAM
gggucucccugucuuucaca

SEQ ID NO: 31618 - RNA, 20 nt, Artificial Sequence
  spacer sequence CTCN PAM
gggauuuggguuugucaccu

SEQ ID NO: 31619 - RNA, 20 nt, Artificial Sequence
  spacer sequence CTCN PAM
aaggugacaaacccaaaucc

SEQ ID NO: 31620 - RNA, 20 nt, Artificial Sequence
  spacer sequence CTCN PAM
ccuucccauucauggccauc

SEQ ID NO: 31621 - RNA, 20 nt, Artificial Sequence
  spacer sequence CTCN PAM
gcacccugauccucaccuuc

SEQ ID NO: 31622 - RNA, 20 nt, Artificial Sequence
  spacer sequence CTCN PAM
ugcucagcacccugauccuc

SEQ ID NO: 31623 - RNA, 20 nt, Artificial Sequence
  spacer sequence CTCN PAM
aggauggggcacccaccugc

SEQ ID NO: 31624 - RNA, 20 nt, Artificial Sequence
  spacer sequence CTCN PAM
agacgggacuccugcucagc

SEQ ID NO: 31625 - RNA, 20 nt, Artificial Sequence
  spacer sequence CTCN PAM
gucuccagucuguagaugga

SEQ ID NO: 31626 - RNA, 20 nt, Artificial Sequence
  spacer sequence CTCN PAM
agucuguagauggacggcag

SEQ ID NO: 31627 - RNA, 20 nt, Artificial Sequence
  spacer sequence CTCN PAM
gaucugccguccaucuacag

SEQ ID NO: 31628 - RNA, 20 nt, Artificial Sequence
  spacer sequence CTCN PAM
gccgggggccggggcuucuu

SEQ ID NO: 31629 - RNA, 20 nt, Artificial Sequence
  spacer sequence CTCN PAM
gcccccacggaagaagcccc

SEQ ID NO: 31630 - RNA, 20 nt, Artificial Sequence
  spacer sequence CTCN PAM
agaggugagugccaugagug

SEQ ID NO: 31631 - RNA, 20 nt, Artificial Sequence
  spacer sequence CTCN PAM
agagaacccacggccccguc

SEQ ID NO: 31632 - RNA, 20 nt, Artificial Sequence
  spacer sequence CTCN PAM
ccucuagagaacccacggcc

SEQ ID NO: 31633 - RNA, 20 nt, Artificial Sequence
  spacer sequence CTCN PAM
uggcacucaccucuagagaa

SEQ ID NO: 31634 - RNA, 20 nt, Artificial Sequence
  spacer sequence CTCN PAM
cagcauccccaagggaccca

SEQ ID NO: 31635 - RNA, 20 nt, Artificial Sequence
  spacer sequence CTCN PAM
caccagcaguaccucacagc

SEQ ID NO: 31636 - RNA, 20 nt, Artificial Sequence
  spacer sequence CTCN PAM
cuuuuuccuguaugugcagg

SEQ ID NO: 31637 - RNA, 20 nt, Artificial Sequence
  spacer sequence CTCN PAM
ugcacauacaggaaaaagug

SEQ ID NO: 31638 - RNA, 20 nt, Artificial Sequence
  spacer sequence CTCN PAM
uccugcacauacaggaaaaa

SEQ ID NO: 31639 - RNA, 20 nt, Artificial Sequence
  spacer sequence CTCN PAM
guccccuccuccugcacaua

SEQ ID NO: 31640 - RNA, 20 nt, Artificial Sequence
  spacer sequence CTCN PAM
aaccgguuccccccauagcc

SEQ ID NO: 31641 - RNA, 20 nt, Artificial Sequence
  spacer sequence CTCN PAM
uggacucgaaccgguucccc

SEQ ID NO: 31642 - RNA, 20 nt, Artificial Sequence
  spacer sequence CTCN PAM
guagcccccacuccuggacu

SEQ ID NO: 31643 - RNA, 20 nt, Artificial Sequence
  spacer sequence CTCN PAM
agagacuacuauagcaggug

SEQ ID NO: 31644 - RNA, 20 nt, Artificial Sequence
  spacer sequence CTCN PAM
ggagccuccguagcccccac

SEQ ID NO: 31645 - RNA, 20 nt, Artificial Sequence
  spacer sequence CTCN PAM
ccugcuauaguagucucugg

SEQ ID NO: 31646 - RNA, 20 nt, Artificial Sequence
  spacer sequence CTCN PAM
cccucaccugcuauaguagu

SEQ ID NO: 31647 - RNA, 20 nt, Artificial Sequence
  spacer sequence CTCN PAM
cccagggaccugggacccgg

SEQ ID NO: 31648 - RNA, 20 nt, Artificial Sequence
  spacer sequence CTCN PAM
gcucccccagggaccuggga

SEQ ID NO: 31649 - RNA, 20 nt, Artificial Sequence
  spacer sequence CTCN PAM
ucucagcucccccagggacc

SEQ ID NO: 31650 - RNA, 20 nt, Artificial Sequence
  spacer sequence CTCN PAM
uugcccagccagucucaucu

SEQ ID NO: 31651 - RNA, 20 nt, Artificial Sequence
  spacer sequence CTCN PAM
gcuccuugcccagccagucu

SEQ ID NO: 31652 - RNA, 20 nt, Artificial Sequence
  spacer sequence CTCN PAM
uggccuggguccccaccugc

SEQ ID NO: 31653 - RNA, 20 nt, Artificial Sequence
  spacer sequence CTCN PAM
ucuuggccuggguccccacc

SEQ ID NO: 31654 - RNA, 20 nt, Artificial Sequence
  spacer sequence CTCN PAM
ccucuuggccugggucccca

SEQ ID NO: 31655 - RNA, 20 nt, Artificial Sequence
  spacer sequence CTCN PAM
ucuccucuuggccugggucc

SEQ ID NO: 31656 - RNA, 20 nt, Artificial Sequence
  spacer sequence CTCN PAM
ggacauucgcagaagcggga

SEQ ID NO: 31657 - RNA, 20 nt, Artificial Sequence
  spacer sequence CTCN PAM
cgcuucugcgaauguccuga

SEQ ID NO: 31658 - RNA, 20 nt, Artificial Sequence
  spacer sequence CTCN PAM
accagccugucccccaggcc

SEQ ID NO: 31659 - RNA, 20 nt, Artificial Sequence
  spacer sequence CTCN PAM
gccuguuguggcagagcaga

SEQ ID NO: 31660 - RNA, 20 nt, Artificial Sequence
  spacer sequence CTCN PAM
gccacaacaggcugagccgc

SEQ ID NO: 31661 - RNA, 20 nt, Artificial Sequence
  spacer sequence CTCN PAM
acguuugucugucuugcagc

SEQ ID NO: 31662 - RNA, 20 nt, Artificial Sequence
  spacer sequence CTCN PAM
ggcugcaagacagacaaacg

SEQ ID NO: 31663 - RNA, 20 nt, Artificial Sequence
  spacer sequence CTCN PAM
gacuccggcugcaagacaga

SEQ ID NO: 31664 - RNA, 20 nt, Artificial Sequence
  spacer sequence CTCN PAM
ggucacuguagccaccacuc

SEQ ID NO: 31665 - RNA, 20 nt, Artificial Sequence
  spacer sequence CTCN PAM
ggcggguccuacagagacag

SEQ ID NO: 31666 - RNA, 20 nt, Artificial Sequence
  spacer sequence CTCN PAM
guaggacccgcccgagcucc

SEQ ID NO: 31667 - RNA, 20 nt, Artificial Sequence
  spacer sequence CTCN PAM
gagggcgccacgcugcugug

SEQ ID NO: 31668 - RNA, 20 nt, Artificial Sequence
  spacer sequence CTCN PAM
gagugugacuuaccguaacu

SEQ ID NO: 31669 - RNA, 20 nt, Artificial Sequence
  spacer sequence CTCN PAM
caccgcaggccacagcagcg

SEQ ID NO: 31670 - RNA, 20 nt, Artificial Sequence
  spacer sequence CTCN PAM
guucaccuuggugcccucuc

SEQ ID NO: 31671 - RNA, 20 nt, Artificial Sequence
  spacer sequence CTCN PAM
ccaagcacuuuaggcuggac

SEQ ID NO: 31672 - RNA, 20 nt, Artificial Sequence
  spacer sequence CTCN PAM
aagcacuuuaggcuggacac

SEQ ID NO: 31673 - RNA, 20 nt, Artificial Sequence
  spacer sequence CTCN PAM
gaccuugucacugugcuugc

SEQ ID NO: 31674 - RNA, 20 nt, Artificial Sequence
  spacer sequence CTCN PAM
ucugggcaagcacagugaca

SEQ ID NO: 31675 - RNA, 20 nt, Artificial Sequence
  spacer sequence CTCN PAM
cagagccauuucuaucgcag

SEQ ID NO: 31676 - RNA, 20 nt, Artificial Sequence
  spacer sequence CTCN PAM
gagccauuucuaucgcagga

SEQ ID NO: 31677 - RNA, 20 nt, Artificial Sequence
  spacer sequence CTCN PAM
gagaggacagaugcgccucu

SEQ ID NO: 31678 - RNA, 20 nt, Artificial Sequence
  spacer sequence CTCN PAM
uuuggcuuuugcguccugcg

SEQ ID NO: 31679 - RNA, 20 nt, Artificial Sequence
  spacer sequence CTCN PAM
cuugccuuuuuggucagucu

SEQ ID NO: 31680 - RNA, 20 nt, Artificial Sequence
  spacer sequence CTCN PAM
cccuugccuuuuuggucagu

SEQ ID NO: 31681 - RNA, 20 nt, Artificial Sequence
  spacer sequence CTCN PAM
cucucccuugccuuuuuggu

SEQ ID NO: 31682 - RNA, 20 nt, Artificial Sequence
  spacer sequence CTCN PAM
cucggcuguggggggugguu

SEQ ID NO: 31683 - RNA, 20 nt, Artificial Sequence
  spacer sequence CTCN PAM
gcuguggggggugguugcuc

SEQ ID NO: 31684 - RNA, 20 nt, Artificial Sequence
  spacer sequence CTCN PAM
ccggccgcaggccgcgcccu

SEQ ID NO: 31685 - RNA, 20 nt, Artificial Sequence
  spacer sequence CTCN PAM
ggggugaagcugccucuugu

SEQ ID NO: 31686 - RNA, 20 nt, Artificial Sequence
  spacer sequence CTCN PAM
uguugcuucggugccuuuac

SEQ ID NO: 31687 - RNA, 20 nt, Artificial Sequence
  spacer sequence CTCN PAM
gcuacacacaacgaguaaaa

SEQ ID NO: 31688 - RNA, 20 nt, Artificial Sequence
  spacer sequence CTCN PAM
uuguguguagcugaggacaa

SEQ ID NO: 31689 - RNA, 20 nt, Artificial Sequence
  spacer sequence CTCN PAM
agaucguccuuccaauggcu

SEQ ID NO: 31690 - RNA, 20 nt, Artificial Sequence
  spacer sequence CTCN PAM
cacaaucuuuaaacacacag

SEQ ID NO: 31691 - RNA, 20 nt, Artificial Sequence
  spacer sequence CTCN PAM
uuguauucccacuuucguag

SEQ ID NO: 31692 - RNA, 20 nt, Artificial Sequence
  spacer sequence CTCN PAM
uuacuagacuuuucuuuuua

SEQ ID NO: 31693 - RNA, 20 nt, Artificial Sequence
  spacer sequence CTCN PAM
aaaaaaaacagcacuuccuu

SEQ ID NO: 31694 - RNA, 20 nt, Artificial Sequence
  spacer sequence CTCN PAM
uggucaaaaaaguaaaugcu

SEQ ID NO: 31695 - RNA, 20 nt, Artificial Sequence
  spacer sequence CTCN PAM
uggcucguggucaaaaaagu

SEQ ID NO: 31696 - RNA, 20 nt, Artificial Sequence
  spacer sequence CTCN PAM
cuucucugagaucgaacgga

SEQ ID NO: 31697 - RNA, 20 nt, Artificial Sequence
  spacer sequence CTCN PAM
gagaucgaacggacugugaa

SEQ ID NO: 31698 - RNA, 20 nt, Artificial Sequence
  spacer sequence CTCN PAM
gagaagugaguggggcaccc

SEQ ID NO: 31699 - RNA, 20 nt, Artificial Sequence
  spacer sequence CTCN PAM
uugucggaagcugagcaagc

SEQ ID NO: 31700 - RNA, 20 nt, Artificial Sequence
  spacer sequence CTCN PAM
gcuuccgacaaagagcggau

SEQ ID NO: 31701 - RNA, 20 nt, Artificial Sequence
  spacer sequence CTCN PAM
gugugacguuucugagugua

SEQ ID NO: 31702 - RNA, 20 nt, Artificial Sequence
  spacer sequence CTCN PAM
gaaacgucacacggaguugg

SEQ ID NO: 31703 - RNA, 20 nt, Artificial Sequence
  spacer sequence CTCN PAM
agggcaguugcugccacacc

SEQ ID NO: 31704 - RNA, 20 nt, Artificial Sequence
  spacer sequence CTCN PAM
gggacgucugcacgucuacu

SEQ ID NO: 31705 - RNA, 20 nt, Artificial Sequence
  spacer sequence CTCN PAM
cagggacgucugcacgucua

SEQ ID NO: 31706 - RNA, 20 nt, Artificial Sequence
  spacer sequence CTCN PAM
aucgauguuguauuugcagu

SEQ ID NO: 31707 - RNA, 20 nt, Artificial Sequence
  spacer sequence CTCN PAM
gccacugcaaauacaacauc

SEQ ID NO: 31708 - RNA, 20 nt, Artificial Sequence
  spacer sequence CTCN PAM
gacaauucccuugcauugca

SEQ ID NO: 31709 - RNA, 20 nt, Artificial Sequence
  spacer sequence CTCN PAM
uugcugcgggcuccugcagc

SEQ ID NO: 31710 - RNA, 20 nt, Artificial Sequence
  spacer sequence CTCN PAM
ugcagccagaccugagcaga

SEQ ID NO: 31711 - RNA, 20 nt, Artificial Sequence
  spacer sequence CTCN PAM
ggucuggcugcaggagcccg

SEQ ID NO: 31712 - RNA, 20 nt, Artificial Sequence
  spacer sequence CTCN PAM
gcucaggucuggcugcagga

SEQ ID NO: 31713 - RNA, 20 nt, Artificial Sequence
  spacer sequence CTCN PAM
cugcucaggucuggcugcag

SEQ ID NO: 31714 - RNA, 20 nt, Artificial Sequence
  spacer sequence CTCN PAM
cucugcucaggucuggcugc

SEQ ID NO: 31715 - RNA, 20 nt, Artificial Sequence
  spacer sequence CTCN PAM
accuucucucucugcucagg

SEQ ID NO: 31716 - RNA, 20 nt, Artificial Sequence
  spacer sequence CTCN PAM
gcaggccccagggaaggcuu

SEQ ID NO: 31717 - RNA, 20 nt, Artificial Sequence
  spacer sequence CTCN PAM
cuuucuagcucugcaggccc

SEQ ID NO: 31718 - RNA, 20 nt, Artificial Sequence
  spacer sequence CTCN PAM
ccuacccugaccagcgccag

SEQ ID NO: 31719 - RNA, 20 nt, Artificial Sequence
  spacer sequence CTCN PAM
cgucccccgccuggcucccc

SEQ ID NO: 31720 - RNA, 20 nt, Artificial Sequence
  spacer sequence CTCN PAM
ggccucagggcagcccuggg

SEQ ID NO: 31721 - RNA, 20 nt, Artificial Sequence
  spacer sequence CTCN PAM
gggcagcccugggaggcuuc

SEQ ID NO: 31722 - RNA, 20 nt, Artificial Sequence
  spacer sequence CTCN PAM
cagggcugcccugaggccug

SEQ ID NO: 31723 - RNA, 20 nt, Artificial Sequence
  spacer sequence CTCN PAM
ggccaccacugccagaagcc

SEQ ID NO: 31724 - RNA, 20 nt, Artificial Sequence
  spacer sequence CTCN PAM
gucuagaagcaggccagaga

SEQ ID NO: 31725 - RNA, 20 nt, Artificial Sequence
  spacer sequence CTCN PAM
ggccugcuucuagacugagg

SEQ ID NO: 31726 - RNA, 20 nt, Artificial Sequence
  spacer sequence CTCN PAM
cuggccugcuucuagacuga

SEQ ID NO: 31727 - RNA, 20 nt, Artificial Sequence
  spacer sequence CTCN PAM
gcucucuggccugcuucuag

SEQ ID NO: 31728 - RNA, 20 nt, Artificial Sequence
  spacer sequence CTCN PAM
gacggccagccgguuagcua

SEQ ID NO: 31729 - RNA, 20 nt, Artificial Sequence
  spacer sequence CTCN PAM
ugaagcaacagcagaacuag

SEQ ID NO: 31730 - RNA, 20 nt, Artificial Sequence
  spacer sequence CTCN PAM
gaacucgugaagcaacagca

SEQ ID NO: 31731 - RNA, 20 nt, Artificial Sequence
  spacer sequence CTCN PAM
gcuagccuauggaagcugca

SEQ ID NO: 31732 - RNA, 20 nt, Artificial Sequence
  spacer sequence CTCN PAM
gaggacagaaguguugugcg

SEQ ID NO: 31733 - RNA, 20 nt, Artificial Sequence
  spacer sequence CTCN PAM
gagggcugcagcuuccauag

SEQ ID NO: 31734 - RNA, 20 nt, Artificial Sequence
  spacer sequence CTCN PAM
gagacgcaagcugcucccuu

SEQ ID NO: 31735 - RNA, 20 nt, Artificial Sequence
  spacer sequence CTCN PAM
gaggguucuguugggcgcac

SEQ ID NO: 31736 - RNA, 20 nt, Artificial Sequence
  spacer sequence CTCN PAM
cuuggcuagcucauaugugg

SEQ ID NO: 31737 - RNA, 20 nt, Artificial Sequence
  spacer sequence CTCN PAM
uauguggaaauagcccugua

SEQ ID NO: 31738 - RNA, 20 nt, Artificial Sequence
  spacer sequence CTCN PAM
aauuacagggcuauuuccac

SEQ ID NO: 31739 - RNA, 20 nt, Artificial Sequence
  spacer sequence CTCN PAM
uuccgcucguguccacaucc

SEQ ID NO: 31740 - RNA, 20 nt, Artificial Sequence
  spacer sequence CTCN PAM
uguccacaucccucuuguug

SEQ ID NO: 31741 - RNA, 20 nt, Artificial Sequence
  spacer sequence CTCN PAM
uguugagagcucacugaaag

SEQ ID NO: 31742 - RNA, 20 nt, Artificial Sequence
  spacer sequence CTCN PAM
acaagagggauguggacacg

SEQ ID NO: 31743 - RNA, 20 nt, Artificial Sequence
  spacer sequence CTCN PAM
caacaagagggauguggaca

SEQ ID NO: 31744 - RNA, 20 nt, Artificial Sequence
  spacer sequence CTCN PAM
cugaaagucaugugcccggg

SEQ ID NO: 31745 - RNA, 20 nt, Artificial Sequence
  spacer sequence CTCN PAM
ccacgugcagccaggugcag

SEQ ID NO: 31746 - RNA, 20 nt, Artificial Sequence
  spacer sequence CTCN PAM
uagaugaaaucccuuaagca

SEQ ID NO: 31747 - RNA, 20 nt, Artificial Sequence
  spacer sequence CTCN PAM
auugaccgucuuuuccagac

SEQ ID NO: 31748 - RNA, 20 nt, Artificial Sequence
  spacer sequence CTCN PAM
uuaagucacacucuuaacuu

SEQ ID NO: 31749 - RNA, 20 nt, Artificial Sequence
  spacer sequence CTCN PAM
uaacuuagcuuucucugaug

SEQ ID NO: 31750 - RNA, 20 nt, Artificial Sequence
  spacer sequence CTCN PAM
gaugucuguugccgccauua

SEQ ID NO: 31751 - RNA, 20 nt, Artificial Sequence
  spacer sequence CTCN PAM
agaaaaaaacuaauggcggc

SEQ ID NO: 31752 - RNA, 20 nt, Artificial Sequence
  spacer sequence CTCN PAM
aucccauacggguagcuggc

SEQ ID NO: 31753 - RNA, 20 nt, Artificial Sequence
  spacer sequence CTCN PAM
agcugcgccaaggugcagac

SEQ ID NO: 31754 - RNA, 20 nt, Artificial Sequence
  spacer sequence CTCN PAM
gucacaggccagcaugccca

SEQ ID NO: 31755 - RNA, 20 nt, Artificial Sequence
  spacer sequence CTCN PAM
ggcuccgucacaggccagca

SEQ ID NO: 31756 - RNA, 20 nt, Artificial Sequence
  spacer sequence CTCN PAM
ggcuagucagggggcuguga

SEQ ID NO: 31757 - RNA, 20 nt, Artificial Sequence
  spacer sequence CTCN PAM
ccggaaacagccacagcccc

SEQ ID NO: 31758 - RNA, 20 nt, Artificial Sequence
  spacer sequence CTCN PAM
cggccuccccggaaacagcc

SEQ ID NO: 31759 - RNA, 20 nt, Artificial Sequence
  spacer sequence CTCN PAM
cagcugccccucccggccuc

SEQ ID NO: 31760 - RNA, 20 nt, Artificial Sequence
  spacer sequence CTCN PAM
acagggcucacagcugcccc

SEQ ID NO: 31761 - RNA, 20 nt, Artificial Sequence
  spacer sequence CTCN PAM
caacguccuccacagggcuc

SEQ ID NO: 31762 - RNA, 20 nt, Artificial Sequence
  spacer sequence CTCN PAM
gggaaggguggccugagagc

SEQ ID NO: 31763 - RNA, 20 nt, Artificial Sequence
  spacer sequence CTCN PAM
ggccacccuuccccgagucc

SEQ ID NO: 31764 - RNA, 20 nt, Artificial Sequence
  spacer sequence CTCN PAM
caggccacccuuccccgagu

SEQ ID NO: 31765 - RNA, 20 nt, Artificial Sequence
  spacer sequence CTCN PAM
ggggucacugucccaggagg

SEQ ID NO: 31766 - RNA, 20 nt, Artificial Sequence
  spacer sequence CTCN PAM
ugggacagugaccccagagg

SEQ ID NO: 31767 - RNA, 20 nt, Artificial Sequence
  spacer sequence CTCN PAM
uguuccaggugaagucccuc

SEQ ID NO: 31768 - RNA, 20 nt, Artificial Sequence
  spacer sequence CTCN PAM
agcucuuguuccaggugaag

SEQ ID NO: 31769 - RNA, 20 nt, Artificial Sequence
  spacer sequence CTCN PAM
ugggcaagcggcugccucca

SEQ ID NO: 31770 - RNA, 20 nt, Artificial Sequence
  spacer sequence CTCN PAM
ucccgaaagcacuuacaggg

SEQ ID NO: 31771 - RNA, 20 nt, Artificial Sequence
  spacer sequence CTCN PAM
gcgccacaugccacucuucc

SEQ ID NO: 31772 - RNA, 20 nt, Artificial Sequence
  spacer sequence CTCN PAM
cugaaacgcccaggugccgc

SEQ ID NO: 31773 - RNA, 20 nt, Artificial Sequence
  spacer sequence CTCN PAM
cccgcaccuauggccccaug

SEQ ID NO: 31774 - RNA, 20 nt, Artificial Sequence
  spacer sequence CTCN PAM
cgcaccuauggccccauggc

SEQ ID NO: 31775 - RNA, 20 nt, Artificial Sequence
  spacer sequence CTCN PAM
cgggagcgccgggucccccg

SEQ ID NO: 31776 - RNA, 20 nt, Artificial Sequence
  spacer sequence CTCN PAM
cgggaggcgcugcccugcac

SEQ ID NO: 31777 - RNA, 20 nt, Artificial Sequence
  spacer sequence CTCN PAM
aggcgggggacccggcgcuc

SEQ ID NO: 31778 - RNA, 20 nt, Artificial Sequence
  spacer sequence CTCN PAM
cucccuuccuccuccuucca

SEQ ID NO: 31779 - RNA, 20 nt, Artificial Sequence
  spacer sequence CTCN PAM
cuuccuccuccuuccaggag

SEQ ID NO: 31780 - RNA, 20 nt, Artificial Sequence
  spacer sequence CTCN PAM
uccuuccaggaggcgcuucg

SEQ ID NO: 31781 - RNA, 20 nt, Artificial Sequence
  spacer sequence CTCN PAM
uuccaggaggcgcuucgcca

SEQ ID NO: 31782 - RNA, 20 nt, Artificial Sequence
  spacer sequence CTCN PAM
uggaaggaggaggaagggag

SEQ ID NO: 31783 - RNA, 20 nt, Artificial Sequence
  spacer sequence CTCN PAM
cuggcgaagcgccuccugga

SEQ ID NO: 31784 - RNA, 20 nt, Artificial Sequence
  spacer sequence CTCN PAM
gggccucgagucucuccugg

SEQ ID NO: 31785 - RNA, 20 nt, Artificial Sequence
  spacer sequence CTCN PAM
agucucuccuggagcacggg

SEQ ID NO: 31786 - RNA, 20 nt, Artificial Sequence
  spacer sequence CTCN PAM
aggcccugagcccgcaccuc

SEQ ID NO: 31787 - RNA, 20 nt, Artificial Sequence
  spacer sequence CTCN PAM
ccuggagcacgggcugcggu

SEQ ID NO: 31788 - RNA, 20 nt, Artificial Sequence
  spacer sequence CTCN PAM
uggagcacgggcugcggugc

SEQ ID NO: 31789 - RNA, 20 nt, Artificial Sequence
  spacer sequence CTCN PAM
aggagagacucgaggcccug

SEQ ID NO: 31790 - RNA, 20 nt, Artificial Sequence
  spacer sequence CTCN PAM
acaucguugugggcaaggac

SEQ ID NO: 31791 - RNA, 20 nt, Artificial Sequence
  spacer sequence CTCN PAM
gcuuucugggugcacacgug

SEQ ID NO: 31792 - RNA, 20 nt, Artificial Sequence
  spacer sequence CTCN PAM
gccgacagaccccccugaac

SEQ ID NO: 31793 - RNA, 20 nt, Artificial Sequence
  spacer sequence CTCN PAM
guucagcgcacgaguaggac

SEQ ID NO: 31794 - RNA, 20 nt, Artificial Sequence
  spacer sequence CTCN PAM
ugcgcugaaccgagguccgc

SEQ ID NO: 31795 - RNA, 20 nt, Artificial Sequence
  spacer sequence CTCN PAM
gacaaugacccuugcagucu

SEQ ID NO: 31796 - RNA, 20 nt, Artificial Sequence
  spacer sequence CTCN PAM
ccacugaggggguucgcagc

SEQ ID NO: 31797 - RNA, 20 nt, Artificial Sequence
  spacer sequence CTCN PAM
guggcgagccccccgcgguc

SEQ ID NO: 31798 - RNA, 20 nt, Artificial Sequence
  spacer sequence CTCN PAM
gcgcugcgaacccccucagu

SEQ ID NO: 31799 - RNA, 20 nt, Artificial Sequence
  spacer sequence CTCN PAM
agucucgcgggaucugaggc

SEQ ID NO: 31800 - RNA, 20 nt, Artificial Sequence
  spacer sequence CTCN PAM
cgggaucugaggcgcacucg

SEQ ID NO: 31801 - RNA, 20 nt, Artificial Sequence
  spacer sequence CTCN PAM
gaucccgcgagacuggaguc

SEQ ID NO: 31802 - RNA, 20 nt, Artificial Sequence
  spacer sequence CTCN PAM
gcuucgagggagcggcggcc

SEQ ID NO: 31803 - RNA, 20 nt, Artificial Sequence
  spacer sequence CTCN PAM
aagccgagugcgccucagau

SEQ ID NO: 31804 - RNA, 20 nt, Artificial Sequence
  spacer sequence CTCN PAM
cucgaagccgagugcgccuc

SEQ ID NO: 31805 - RNA, 20 nt, Artificial Sequence
  spacer sequence CTCN PAM
gcccaagacggggccugaca

SEQ ID NO: 31806 - RNA, 20 nt, Artificial Sequence
  spacer sequence CTCN PAM
caagccugcuacagggaacc

SEQ ID NO: 31807 - RNA, 20 nt, Artificial Sequence
  spacer sequence CTCN PAM
guguccgugaggccggggca

SEQ ID NO: 31808 - RNA, 20 nt, Artificial Sequence
  spacer sequence CTCN PAM
cggacacugagaacgcgucg

SEQ ID NO: 31809 - RNA, 20 nt, Artificial Sequence
  spacer sequence CTCN PAM
ugccccggccucacggacac

SEQ ID NO: 31810 - RNA, 20 nt, Artificial Sequence
  spacer sequence CTCN PAM
uucccacccacuucggggcg

SEQ ID NO: 31811 - RNA, 20 nt, Artificial Sequence
  spacer sequence CTCN PAM
ggccgcucauucccacccac

SEQ ID NO: 31812 - RNA, 20 nt, Artificial Sequence
  spacer sequence CTCN PAM
ccgcugccagcccgauuucc

SEQ ID NO: 31813 - RNA, 20 nt, Artificial Sequence
  spacer sequence CTCN PAM
gaagccgcgaccccccacgc

SEQ ID NO: 31814 - RNA, 20 nt, Artificial Sequence
  spacer sequence CTCN PAM
gccggcugcgccuugccggg

SEQ ID NO: 31815 - RNA, 20 nt, Artificial Sequence
  spacer sequence CTCN PAM
cacgggcgggcuccgggccu

SEQ ID NO: 31816 - RNA, 20 nt, Artificial Sequence
  spacer sequence CTCN PAM
gggccuccguccugaucccu

SEQ ID NO: 31817 - RNA, 20 nt, Artificial Sequence
  spacer sequence CTCN PAM
guccugaucccuuggagcgg

SEQ ID NO: 31818 - RNA, 20 nt, Artificial Sequence
  spacer sequence CTCN PAM
aagggaucaggacggaggcc

SEQ ID NO: 31819 - RNA, 20 nt, Artificial Sequence
  spacer sequence CTCN PAM
ccaggcggaggcggggcccg

SEQ ID NO: 31820 - RNA, 20 nt, Artificial Sequence
  spacer sequence CTCN PAM
gccuggugagccccggcgcu

SEQ ID NO: 31821 - RNA, 20 nt, Artificial Sequence
  spacer sequence CTCN PAM
gccuccgcgccccauuggcu

SEQ ID NO: 31822 - RNA, 20 nt, Artificial Sequence
  spacer sequence CTCN PAM
gcgccccauuggcuggcauc

SEQ ID NO: 31823 - RNA, 20 nt, Artificial Sequence
  spacer sequence CTCN PAM
gcgcgccugacugacagcgc

SEQ ID NO: 31824 - RNA, 20 nt, Artificial Sequence
  spacer sequence CTCN PAM
ugcuggcgcugcugcuggcg

SEQ ID NO: 31825 - RNA, 20 nt, Artificial Sequence
  spacer sequence CTCN PAM
ucggcaccgcacggcagcgc

SEQ ID NO: 31826 - RNA, 20 nt, Artificial Sequence
  spacer sequence CTCN PAM
ccgcugcgccccgcgcaggu

SEQ ID NO: 31827 - RNA, 20 nt, Artificial Sequence
  spacer sequence CTCN PAM
cguucgucacggccggcggc

SEQ ID NO: 31828 - RNA, 20 nt, Artificial Sequence
  spacer sequence CTCN PAM
gcgcugacgcgcuccuucua

SEQ ID NO: 31829 - RNA, 20 nt, Artificial Sequence
  spacer sequence CTCN PAM
uucuacgugauccugggcuu

SEQ ID NO: 31830 - RNA, 20 nt, Artificial Sequence
  spacer sequence CTCN PAM
acuuccugauccgggcguuu

SEQ ID NO: 31831 - RNA, 20 nt, Artificial Sequence
  spacer sequence CTCN PAM
cagccuuggccaauuagcgc

SEQ ID NO: 31832 - RNA, 20 nt, Artificial Sequence
  spacer sequence CTCN PAM
gccuuggccaauuagcgcgc

SEQ ID NO: 31833 - RNA, 20 nt, Artificial Sequence
  spacer sequence CTCN PAM
ccucccucccucccucccuc

SEQ ID NO: 31834 - RNA, 20 nt, Artificial Sequence
  spacer sequence CTCN PAM
cucccucccucccucccucu

SEQ ID NO: 31835 - RNA, 20 nt, Artificial Sequence
  spacer sequence CTCN PAM
cucccucccucccucucucc

SEQ ID NO: 31836 - RNA, 20 nt, Artificial Sequence
  spacer sequence CTCN PAM
cucccucccucucucccugu

SEQ ID NO: 31837 - RNA, 20 nt, Artificial Sequence
  spacer sequence CTCN PAM
cucccucucucccuguugga

SEQ ID NO: 31838 - RNA, 20 nt, Artificial Sequence
  spacer sequence CTCN PAM
cucucucccuguuggagugg

SEQ ID NO: 31839 - RNA, 20 nt, Artificial Sequence
  spacer sequence CTCN PAM
cucccuguuggagugggcgu

SEQ ID NO: 31840 - RNA, 20 nt, Artificial Sequence
  spacer sequence CTCN PAM
cccuguuggagugggcgugg

SEQ ID NO: 31841 - RNA, 20 nt, Artificial Sequence
  spacer sequence CTCN PAM
cuguuggagugggcgugggc

SEQ ID NO: 31842 - RNA, 20 nt, Artificial Sequence
  spacer sequence CTCN PAM
aacagggagagagggaggga

SEQ ID NO: 31843 - RNA, 20 nt, Artificial Sequence
  spacer sequence CTCN PAM
cccgcucuccagccugcgcc

SEQ ID NO: 31844 - RNA, 20 nt, Artificial Sequence
  spacer sequence CTCN PAM
ccagccugcgccugggguug

SEQ ID NO: 31845 - RNA, 20 nt, Artificial Sequence
  spacer sequence CTCN PAM
agccugcgccugggguugga

SEQ ID NO: 31846 - RNA, 20 nt, Artificial Sequence
  spacer sequence CTCN PAM
aaccccaggcgcaggcugga

SEQ ID NO: 31847 - RNA, 20 nt, Artificial Sequence
  spacer sequence CTCN PAM
uaacucgggggugacgcugc

SEQ ID NO: 31848 - RNA, 20 nt, Artificial Sequence
  spacer sequence CTCN PAM
ggggugacgcugcccguuuc

SEQ ID NO: 31849 - RNA, 20 nt, Artificial Sequence
  spacer sequence CTCN PAM
ggcuucaguggccccaccug

SEQ ID NO: 31850 - RNA, 20 nt, Artificial Sequence
  spacer sequence CTCN PAM
ccccgccagggccugacccc

SEQ ID NO: 31851 - RNA, 20 nt, Artificial Sequence
  spacer sequence CTCN PAM
uuggcuccuugucgccggau

SEQ ID NO: 31852 - RNA, 20 nt, Artificial Sequence
  spacer sequence CTCN PAM
uugucgccggaugcccgucc

SEQ ID NO: 31853 - RNA, 20 nt, Artificial Sequence
  spacer sequence CTCN PAM
uucucaucuucccgccugcc

SEQ ID NO: 31854 - RNA, 20 nt, Artificial Sequence
  spacer sequence CTCN PAM
ucuucccgccugccgccagg

SEQ ID NO: 31855 - RNA, 20 nt, Artificial Sequence
  spacer sequence CTCN PAM
cacagcccgggaggugcagc

SEQ ID NO: 31856 - RNA, 20 nt, Artificial Sequence
  spacer sequence CTCN PAM
cgggcugugggagcacccaa

SEQ ID NO: 31857 - RNA, 20 nt, Artificial Sequence
  spacer sequence CTCN PAM
cgggggucuccagcuguagg

SEQ ID NO: 31858 - RNA, 20 nt, Artificial Sequence
  spacer sequence CTCN PAM
agcuguaggcagccccuggg

SEQ ID NO: 31859 - RNA, 20 nt, Artificial Sequence
  spacer sequence CTCN PAM
ugcccaggggcugccuacag

SEQ ID NO: 31860 - RNA, 20 nt, Artificial Sequence
  spacer sequence CTCN PAM
agucuccucugggcuccuga

SEQ ID NO: 31861 - RNA, 20 nt, Artificial Sequence
  spacer sequence CTCN PAM
ucugggcuccugacuaccca

SEQ ID NO: 31862 - RNA, 20 nt, Artificial Sequence
  spacer sequence CTCN PAM
gggcuccugacuacccagug

SEQ ID NO: 31863 - RNA, 20 nt, Artificial Sequence
  spacer sequence CTCN PAM
ugacuacccaguguggcugc

SEQ ID NO: 31864 - RNA, 20 nt, Artificial Sequence
  spacer sequence CTCN PAM
cgggugggagagacacagcg

SEQ ID NO: 31865 - RNA, 20 nt, Artificial Sequence
  spacer sequence CTCN PAM
cacccgggagaagcagccac

SEQ ID NO: 31866 - RNA, 20 nt, Artificial Sequence
  spacer sequence CTCN PAM
cccacccgggagaagcagcc

SEQ ID NO: 31867 - RNA, 20 nt, Artificial Sequence
  spacer sequence CTCN PAM
cugugucucucccacccggg

SEQ ID NO: 31868 - RNA, 20 nt, Artificial Sequence
  spacer sequence CTCN PAM
ccaucaccacccuggcaaag

SEQ ID NO: 31869 - RNA, 20 nt, Artificial Sequence
  spacer sequence CTCN PAM
ccauguuacccgcgcugguc

SEQ ID NO: 31870 - RNA, 20 nt, Artificial Sequence
  spacer sequence CTCN PAM
ugggcucaagugauccuuuu

SEQ ID NO: 31871 - RNA, 20 nt, Artificial Sequence
  spacer sequence CTCN PAM
agugauccuuuuucguuggc

SEQ ID NO: 31872 - RNA, 20 nt, Artificial Sequence
  spacer sequence CTCN PAM
caaagugcuggcauuauaga

SEQ ID NO: 31873 - RNA, 20 nt, Artificial Sequence
  spacer sequence CTCN PAM
caucuauaaugccagcacuu

SEQ ID NO: 31874 - RNA, 20 nt, Artificial Sequence
  spacer sequence CTCN PAM
gccaugcugcuuuuuauggg

SEQ ID NO: 31875 - RNA, 20 nt, Artificial Sequence
  spacer sequence CTCN PAM
gcacagggcccauaaaaagc

SEQ ID NO: 31876 - RNA, 20 nt, Artificial Sequence
  spacer sequence CTCN PAM
ccugugcuccacaccucuuc

SEQ ID NO: 31877 - RNA, 20 nt, Artificial Sequence
  spacer sequence CTCN PAM
acaccucuuccuguggaagc

SEQ ID NO: 31878 - RNA, 20 nt, Artificial Sequence
  spacer sequence CTCN PAM
uccuguggaagcaccugcug

SEQ ID NO: 31879 - RNA, 20 nt, Artificial Sequence
  spacer sequence CTCN PAM
ccccugccuguaugccgcgc

SEQ ID NO: 31880 - RNA, 20 nt, Artificial Sequence
  spacer sequence CTCN PAM
ccugccuguaugccgcgccc

SEQ ID NO: 31881 - RNA, 20 nt, Artificial Sequence
  spacer sequence CTCN PAM
cugccucccgggcugcuggg

SEQ ID NO: 31882 - RNA, 20 nt, Artificial Sequence
  spacer sequence CTCN PAM
cgggcugcuggggccaccag

SEQ ID NO: 31883 - RNA, 20 nt, Artificial Sequence
  spacer sequence CTCN PAM
gggccaagccccugguggcc

SEQ ID NO: 31884 - RNA, 20 nt, Artificial Sequence
  spacer sequence CTCN PAM
ccccugugugagccucaguc

SEQ ID NO: 31885 - RNA, 20 nt, Artificial Sequence
  spacer sequence CTCN PAM
cacaggggugagacuuugcc

SEQ ID NO: 31886 - RNA, 20 nt, Artificial Sequence
  spacer sequence CTCN PAM
gucuuuucaucagugcaaug

SEQ ID NO: 31887 - RNA, 20 nt, Artificial Sequence
  spacer sequence CTCN PAM
cauugcacugaugaaaagac

SEQ ID NO: 31888 - RNA, 20 nt, Artificial Sequence
  spacer sequence CTCN PAM
ccugggguccuggcgcaggg

SEQ ID NO: 31889 - RNA, 20 nt, Artificial Sequence
  spacer sequence CTCN PAM
ugggguccuggcgcagggga

SEQ ID NO: 31890 - RNA, 20 nt, Artificial Sequence
  spacer sequence CTCN PAM
ccugcgccaggaccccagga

SEQ ID NO: 31891 - RNA, 20 nt, Artificial Sequence
  spacer sequence CTCN PAM
caucuccccugcgccaggac

SEQ ID NO: 31892 - RNA, 20 nt, Artificial Sequence
  spacer sequence CTCN PAM
cauggcgaugacaguaagaa

SEQ ID NO: 31893 - RNA, 20 nt, Artificial Sequence
  spacer sequence CTCN PAM
cugguuuugcugugccugcu

SEQ ID NO: 31894 - RNA, 20 nt, Artificial Sequence
  spacer sequence CTCN PAM
gggcuccaguagaggacggc

SEQ ID NO: 31895 - RNA, 20 nt, Artificial Sequence
  spacer sequence CTCN PAM
aguagaggacggcaaugaga

SEQ ID NO: 31896 - RNA, 20 nt, Artificial Sequence
  spacer sequence CTCN PAM
acuggagccccgagcccugc

SEQ ID NO: 31897 - RNA, 20 nt, Artificial Sequence
  spacer sequence CTCN PAM
uugccguccucuacuggagc

SEQ ID NO: 31898 - RNA, 20 nt, Artificial Sequence
  spacer sequence CTCN PAM
cauugccguccucuacugga

SEQ ID NO: 31899 - RNA, 20 nt, Artificial Sequence
  spacer sequence CTCN PAM
ggacucucauugccguccuc

SEQ ID NO: 31900 - RNA, 20 nt, Artificial Sequence
  spacer sequence CTCN PAM
uucccucaggacucucauug

SEQ ID NO: 31901 - RNA, 20 nt, Artificial Sequence
  spacer sequence CTCN PAM
uccuucccucaggacucuca

SEQ ID NO: 31902 - RNA, 20 nt, Artificial Sequence
  spacer sequence CTCN PAM
ccgccaacccugccuccucc

SEQ ID NO: 31903 - RNA, 20 nt, Artificial Sequence
  spacer sequence CTCN PAM
gcggaggcgauacggccucc

SEQ ID NO: 31904 - RNA, 20 nt, Artificial Sequence
  spacer sequence CTCN PAM
gcugaggcuucuucaaccug

SEQ ID NO: 31905 - RNA, 20 nt, Artificial Sequence
  spacer sequence CTCN PAM
ucgccaacacugaggacccc

SEQ ID NO: 31906 - RNA, 20 nt, Artificial Sequence
  spacer sequence CTCN PAM
ccaacacugaggaccccacg

SEQ ID NO: 31907 - RNA, 20 nt, Artificial Sequence
  spacer sequence CTCN PAM
guguuggcgaggaggccgua

SEQ ID NO: 31908 - RNA, 20 nt, Artificial Sequence
  spacer sequence CTCN PAM
gugggguccucaguguuggc

SEQ ID NO: 31909 - RNA, 20 nt, Artificial Sequence
  spacer sequence CTCN PAM
cuggacagcgacgaggagac

SEQ ID NO: 31910 - RNA, 20 nt, Artificial Sequence
  spacer sequence CTCN PAM
ucgcuguccagcgaggccau

SEQ ID NO: 31911 - RNA, 20 nt, Artificial Sequence
  spacer sequence CTCN PAM
ucgucgcuguccagcgaggc

SEQ ID NO: 31912 - RNA, 20 nt, Artificial Sequence
  spacer sequence CTCN PAM
aacaccgucuccucgucgcu

SEQ ID NO: 31913 - RNA, 20 nt, Artificial Sequence
  spacer sequence CTCN PAM
gauuccgggacucaaacacc

SEQ ID NO: 31914 - RNA, 20 nt, Artificial Sequence
  spacer sequence CTCN PAM
ggggccucggugggcaggcu

SEQ ID NO: 31915 - RNA, 20 nt, Artificial Sequence
  spacer sequence CTCN PAM
gugggcaggcugggcuggag

SEQ ID NO: 31916 - RNA, 20 nt, Artificial Sequence
  spacer sequence CTCN PAM
agcccagccugcccaccgag

SEQ ID NO: 31917 - RNA, 20 nt, Artificial Sequence
  spacer sequence CTCN PAM
gcaggacccuggggacuugg

SEQ ID NO: 31918 - RNA, 20 nt, Artificial Sequence
  spacer sequence CTCN PAM
auggcuuggccaagucccca

SEQ ID NO: 31919 - RNA, 20 nt, Artificial Sequence
  spacer sequence CTCN PAM
cgcccugaguggagccugug

SEQ ID NO: 31920 - RNA, 20 nt, Artificial Sequence
  spacer sequence CTCN PAM
gggcgggagccccaccgcug

SEQ ID NO: 31921 - RNA, 20 nt, Artificial Sequence
  spacer sequence CTCN PAM
acucagggcgggagccccac

SEQ ID NO: 31922 - RNA, 20 nt, Artificial Sequence
  spacer sequence CTCN PAM
gccaggcaaggaucaggcgg

SEQ ID NO: 31923 - RNA, 20 nt, Artificial Sequence
  spacer sequence CTCN PAM
uuacagaauaaauuggaccc

SEQ ID NO: 31924 - RNA, 20 nt, Artificial Sequence
  spacer sequence CTCN PAM
ccgcauauuuuuagcuuccu

SEQ ID NO: 31925 - RNA, 20 nt, Artificial Sequence
  spacer sequence CTCN PAM
uggcgucgcggccuuugaag

SEQ ID NO: 31926 - RNA, 20 nt, Artificial Sequence
  spacer sequence CTCN PAM
gccuucaaaggccgcgacgc

SEQ ID NO: 31927 - RNA, 20 nt, Artificial Sequence
  spacer sequence CTCN PAM
ggaagggacuuguccagccc

SEQ ID NO: 31928 - RNA, 20 nt, Artificial Sequence
  spacer sequence CTCN PAM
gcacugcugggacugggguc

SEQ ID NO: 31929 - RNA, 20 nt, Artificial Sequence
  spacer sequence CTCN PAM
agaccagggacugagggcga

SEQ ID NO: 31930 - RNA, 20 nt, Artificial Sequence
  spacer sequence CTCN PAM
gucccuggucuggagccagu

SEQ ID NO: 31931 - RNA, 20 nt, Artificial Sequence
  spacer sequence CTCN PAM
gggaacagguguccgccaag

SEQ ID NO: 31932 - RNA, 20 nt, Artificial Sequence
  spacer sequence CTCN PAM
cucugggaacagguguccgc

SEQ ID NO: 31933 - RNA, 20 nt, Artificial Sequence
  spacer sequence CTCN PAM
acaggaagcuuacucuagag

SEQ ID NO: 31934 - RNA, 20 nt, Artificial Sequence
  spacer sequence CTCN PAM
agagugaccuccggccgcgg

SEQ ID NO: 31935 - RNA, 20 nt, Artificial Sequence
  spacer sequence CTCN PAM
agaguaagcuuccuguggag

SEQ ID NO: 31936 - RNA, 20 nt, Artificial Sequence
  spacer sequence CTCN PAM
ggccgcggcugcgucccaaa

SEQ ID NO: 31937 - RNA, 20 nt, Artificial Sequence
  spacer sequence CTCN PAM
cagccccaggagggaacagg

SEQ ID NO: 31938 - RNA, 20 nt, Artificial Sequence
  spacer sequence CTCN PAM
uggggcugggagcugucccg

SEQ ID NO: 31939 - RNA, 20 nt, Artificial Sequence
  spacer sequence CTCN PAM
cccagggccaggccucggag

SEQ ID NO: 31940 - RNA, 20 nt, Artificial Sequence
  spacer sequence CTCN PAM
gagacgcccugcccuccccu

SEQ ID NO: 31941 - RNA, 20 nt, Artificial Sequence
  spacer sequence CTCN PAM
gaggccuggcccugggcgag

SEQ ID NO: 31942 - RNA, 20 nt, Artificial Sequence
  spacer sequence CTCN PAM
ccucccuuccccagguccuu

SEQ ID NO: 31943 - RNA, 20 nt, Artificial Sequence
  spacer sequence CTCN PAM
cuuccccagguccuuccucu

SEQ ID NO: 31944 - RNA, 20 nt, Artificial Sequence
  spacer sequence CTCN PAM
aggagcggccagcgggcgcg

SEQ ID NO: 31945 - RNA, 20 nt, Artificial Sequence
  spacer sequence CTCN PAM
uagaggaaggaccuggggaa

SEQ ID NO: 31946 - RNA, 20 nt, Artificial Sequence
  spacer sequence CTCN PAM
ccgcgcccgcuggccgcucc

SEQ ID NO: 31947 - RNA, 20 nt, Artificial Sequence
  spacer sequence CTCN PAM
gaccuugagagagacaagaa

SEQ ID NO: 31948 - RNA, 20 nt, Artificial Sequence
  spacer sequence CTCN PAM
aggucagagcccaagcaggg

SEQ ID NO: 31949 - RNA, 20 nt, Artificial Sequence
  spacer sequence CTCN PAM
caaggucagagcccaagcag

SEQ ID NO: 31950 - RNA, 20 nt, Artificial Sequence
  spacer sequence CTCN PAM
cucaaggucagagcccaagc

SEQ ID NO: 31951 - RNA, 20 nt, Artificial Sequence
  spacer sequence CTCN PAM
guuuuccuucuguucuuguc

SEQ ID NO: 31952 - RNA, 20 nt, Artificial Sequence
  spacer sequence CTCN PAM
aauccguucagcgguggcgg

SEQ ID NO: 31953 - RNA, 20 nt, Artificial Sequence
  spacer sequence CTCN PAM
cgccucgguggccccugcau

SEQ ID NO: 31954 - RNA, 20 nt, Artificial Sequence
  spacer sequence CTCN PAM
ccucgguggccccugcaugc

SEQ ID NO: 31955 - RNA, 20 nt, Artificial Sequence
  spacer sequence CTCN PAM
guggccccugcaugcaaaug

SEQ ID NO: 31956 - RNA, 20 nt, Artificial Sequence
  spacer sequence CTCN PAM
uuugcaugcaggggccaccg

SEQ ID NO: 31957 - RNA, 20 nt, Artificial Sequence
  spacer sequence CTCN PAM
acccaggcauggcagggcca

SEQ ID NO: 31958 - RNA, 20 nt, Artificial Sequence
  spacer sequence CTCN PAM
caccugugcaggucccaguc

SEQ ID NO: 31959 - RNA, 20 nt, Artificial Sequence
  spacer sequence CTCN PAM
aaccaggacugggaccugca

SEQ ID NO: 31960 - RNA, 20 nt, Artificial Sequence
  spacer sequence CTCN PAM
ucucaaaccaggacugggac

SEQ ID NO: 31961 - RNA, 20 nt, Artificial Sequence
  spacer sequence CTCN PAM
ucccgacccuggcccacccc

SEQ ID NO: 31962 - RNA, 20 nt, Artificial Sequence
  spacer sequence CTCN PAM
cgacccuggcccaccccucc

SEQ ID NO: 31963 - RNA, 20 nt, Artificial Sequence
  spacer sequence CTCN PAM
ucacccacgagaucccuuga

SEQ ID NO: 31964 - RNA, 20 nt, Artificial Sequence
  spacer sequence CTCN PAM
cccacgagaucccuugaagc

SEQ ID NO: 31965 - RNA, 20 nt, Artificial Sequence
  spacer sequence CTCN PAM
ugggugaggaggggugggcc

SEQ ID NO: 31966 - RNA, 20 nt, Artificial Sequence
  spacer sequence CTCN PAM
ugcuucaagggaucucgugg

SEQ ID NO: 31967 - RNA, 20 nt, Artificial Sequence
  spacer sequence CTCN PAM
caccuuugccagguggcaug

SEQ ID NO: 31968 - RNA, 20 nt, Artificial Sequence
  spacer sequence CTCN PAM
cggccccuuguccugugcuu

SEQ ID NO: 31969 - RNA, 20 nt, Artificial Sequence
  spacer sequence CTCN PAM
gcuccgaaagugcucaccuc

SEQ ID NO: 31970 - RNA, 20 nt, Artificial Sequence
  spacer sequence CTCN PAM
gaaagugcucaccuccggga

SEQ ID NO: 31971 - RNA, 20 nt, Artificial Sequence
  spacer sequence CTCN PAM
ccuccgggaguggccguccc

SEQ ID NO: 31972 - RNA, 20 nt, Artificial Sequence
  spacer sequence CTCN PAM
gggaguggccgucccccucc

SEQ ID NO: 31973 - RNA, 20 nt, Artificial Sequence
  spacer sequence CTCN PAM
cggaggugagcacuuucgga

SEQ ID NO: 31974 - RNA, 20 nt, Artificial Sequence
  spacer sequence CTCN PAM
cuaaaagagccccccaccag

SEQ ID NO: 31975 - RNA, 20 nt, Artificial Sequence
  spacer sequence CTCN PAM
uuuagggagggggacggcca

SEQ ID NO: 31976 - RNA, 20 nt, Artificial Sequence
  spacer sequence CTCN PAM
gucugguggggggcucuuuu

SEQ ID NO: 31977 - RNA, 20 nt, Artificial Sequence
  spacer sequence CTCN PAM
agccugucugggcuacagag

SEQ ID NO: 31978 - RNA, 20 nt, Artificial Sequence
  spacer sequence CTCN PAM
guagcccagacaggcuggag

SEQ ID NO: 31979 - RNA, 20 nt, Artificial Sequence
  spacer sequence CTCN PAM
cuccaggggugcugagagag

SEQ ID NO: 31980 - RNA, 20 nt, Artificial Sequence
  spacer sequence CTCN PAM
aggggugcugagagagccug

SEQ ID NO: 31981 - RNA, 20 nt, Artificial Sequence
  spacer sequence CTCN PAM
gcaccccuggagugagggcc

SEQ ID NO: 31982 - RNA, 20 nt, Artificial Sequence
  spacer sequence CTCN PAM
cagcaccccuggagugaggg

SEQ ID NO: 31983 - RNA, 20 nt, Artificial Sequence
  spacer sequence CTCN PAM
cucagcaccccuggagugag

SEQ ID NO: 31984 - RNA, 20 nt, Artificial Sequence
  spacer sequence CTCN PAM
ggacaggcucucucagcacc

SEQ ID NO: 31985 - RNA, 20 nt, Artificial Sequence
  spacer sequence CTCN PAM
gccaccaccugggacagguu

SEQ ID NO: 31986 - RNA, 20 nt, Artificial Sequence
  spacer sequence CTCN PAM
acugaagagacacccggcca

SEQ ID NO: 31987 - RNA, 20 nt, Artificial Sequence
  spacer sequence CTCN PAM
ucaguggagggcgugaaccu

SEQ ID NO: 31988 - RNA, 20 nt, Artificial Sequence
  spacer sequence CTCN PAM
uccccugaccccacuacaga

SEQ ID NO: 31989 - RNA, 20 nt, Artificial Sequence
  spacer sequence CTCN PAM
aggucucauccccugacccc

SEQ ID NO: 31990 - RNA, 20 nt, Artificial Sequence
  spacer sequence CTCN PAM
gaacagacgggcugagcucc

SEQ ID NO: 31991 - RNA, 20 nt, Artificial Sequence
  spacer sequence CTCN PAM
gcccgucuguucugagcucc

SEQ ID NO: 31992 - RNA, 20 nt, Artificial Sequence
  spacer sequence CTCN PAM
cuggaggagagagaacugag

SEQ ID NO: 31993 - RNA, 20 nt, Artificial Sequence
  spacer sequence CTCN PAM
agggagcucagcccgucugu

SEQ ID NO: 31994 - RNA, 20 nt, Artificial Sequence
  spacer sequence CTCN PAM
uccagggagcucagcccguc

SEQ ID NO: 31995 - RNA, 20 nt, Artificial Sequence
  spacer sequence CTCN PAM
ccuccagggagcucagcccg

SEQ ID NO: 31996 - RNA, 20 nt, Artificial Sequence
  spacer sequence CTCN PAM
cuccuccagggagcucagcc

SEQ ID NO: 31997 - RNA, 20 nt, Artificial Sequence
  spacer sequence CTCN PAM
guucucucuccuccagggag

SEQ ID NO: 31998 - RNA, 20 nt, Artificial Sequence
  spacer sequence CTCN PAM
agcgucccugccaggacaag

SEQ ID NO: 31999 - RNA, 20 nt, Artificial Sequence
  spacer sequence CTCN PAM
uccagaaaggucugucccac

SEQ ID NO: 32000 - RNA, 20 nt, Artificial Sequence
  spacer sequence CTCN PAM
cccgauuccccagcgggcca

SEQ ID NO: 32001 - RNA, 20 nt, Artificial Sequence
  spacer sequence CTCN PAM
ucccccgauuccccagcggg

SEQ ID NO: 32002 - RNA, 20 nt, Artificial Sequence
  spacer sequence CTCN PAM
ugcgugcccuccucccccga

SEQ ID NO: 32003 - RNA, 20 nt, Artificial Sequence
  spacer sequence CTCN PAM
guccugugucuccugcgugc

SEQ ID NO: 32004 - RNA, 20 nt, Artificial Sequence
  spacer sequence CTCN PAM
gagcugugggacgguggugg

SEQ ID NO: 32005 - RNA, 20 nt, Artificial Sequence
  spacer sequence CTCN PAM
gagacguggugggcucuguc

SEQ ID NO: 32006 - RNA, 20 nt, Artificial Sequence
  spacer sequence CTCN PAM
ggguucacggucccugccag

SEQ ID NO: 32007 - RNA, 20 nt, Artificial Sequence
  spacer sequence CTCN PAM
uggcagggaccgugaaccca

SEQ ID NO: 32008 - RNA, 20 nt, Artificial Sequence
  spacer sequence CTCN PAM
cacagggaccuucgggucca

SEQ ID NO: 32009 - RNA, 20 nt, Artificial Sequence
  spacer sequence CTCN PAM
ccugcacugggccuggugaa

SEQ ID NO: 32010 - RNA, 20 nt, Artificial Sequence
  spacer sequence CTCN PAM
ugcacugggccuggugaaug

SEQ ID NO: 32011 - RNA, 20 nt, Artificial Sequence
  spacer sequence CTCN PAM
gaauuagugucauucaccag

SEQ ID NO: 32012 - RNA, 20 nt, Artificial Sequence
  spacer sequence CTCN PAM
acaagcucagagucugguga

SEQ ID NO: 32013 - RNA, 20 nt, Artificial Sequence
  spacer sequence CTCN PAM
gagucuggugagggaggcug

SEQ ID NO: 32014 - RNA, 20 nt, Artificial Sequence
  spacer sequence CTCN PAM
gagcuuguggaggguaggcu

SEQ ID NO: 32015 - RNA, 20 nt, Artificial Sequence
  spacer sequence CTCN PAM
ccagacucugagcuugugga

SEQ ID NO: 32016 - RNA, 20 nt, Artificial Sequence
  spacer sequence CTCN PAM
cucaccagacucugagcuug

SEQ ID NO: 32017 - RNA, 20 nt, Artificial Sequence
  spacer sequence CTCN PAM
guuuuugcccuuauucaugc

SEQ ID NO: 32018 - RNA, 20 nt, Artificial Sequence
  spacer sequence CTCN PAM
cgccuguaauccuagcacuu

SEQ ID NO: 32019 - RNA, 20 nt, Artificial Sequence
  spacer sequence CTCN PAM
ggcgaucuucccaccugggc

SEQ ID NO: 32020 - RNA, 20 nt, Artificial Sequence
  spacer sequence CTCN PAM
ugggcucaggcgaucuuccc

SEQ ID NO: 32021 - RNA, 20 nt, Artificial Sequence
  spacer sequence CTCN PAM
auagauuggaaaaaagacaa

SEQ ID NO: 32022 - RNA, 20 nt, Artificial Sequence
  spacer sequence CTCN PAM
gcuuugucuuuuuuccaauc

SEQ ID NO: 32023 - RNA, 20 nt, Artificial Sequence
  spacer sequence CTCN PAM
ugguaggcugacacaggugg

SEQ ID NO: 32024 - RNA, 20 nt, Artificial Sequence
  spacer sequence CTCN PAM
uccugguaggcugacacagg

SEQ ID NO: 32025 - RNA, 20 nt, Artificial Sequence
  spacer sequence CTCN PAM
gcguucccugaacagaucag

SEQ ID NO: 32026 - RNA, 20 nt, Artificial Sequence
  spacer sequence CTCN PAM
ccugccugcaggauucgugc

SEQ ID NO: 32027 - RNA, 20 nt, Artificial Sequence
  spacer sequence CTCN PAM
acgcacgaauccugcaggca

SEQ ID NO: 32028 - RNA, 20 nt, Artificial Sequence
  spacer sequence CTCN PAM
gggcuucuuggaucccaucc

SEQ ID NO: 32029 - RNA, 20 nt, Artificial Sequence
  spacer sequence CTCN PAM
cacuccacaucgguccaccu

SEQ ID NO: 32030 - RNA, 20 nt, Artificial Sequence
  spacer sequence CTCN PAM
acaucgguccaccuacuaug

SEQ ID NO: 32031 - RNA, 20 nt, Artificial Sequence
  spacer sequence CTCN PAM
cggcacccuuagggcugagg

SEQ ID NO: 32032 - RNA, 20 nt, Artificial Sequence
  spacer sequence CTCN PAM
gcccuaagggugccgggagc

SEQ ID NO: 32033 - RNA, 20 nt, Artificial Sequence
  spacer sequence CTCN PAM
auccccagggaacagcgugg

SEQ ID NO: 32034 - RNA, 20 nt, Artificial Sequence
  spacer sequence CTCN PAM
ggacccacgcuguucccugg

SEQ ID NO: 32035 - RNA, 20 nt, Artificial Sequence
  spacer sequence CTCN PAM
ccggacccacgcuguucccu

SEQ ID NO: 32036 - RNA, 20 nt, Artificial Sequence
  spacer sequence CTCN PAM
caggagggccccagggaggu

SEQ ID NO: 32037 - RNA, 20 nt, Artificial Sequence
  spacer sequence CTCN PAM
ugggagucgccucuccggac

SEQ ID NO: 32038 - RNA, 20 nt, Artificial Sequence
  spacer sequence CTCN PAM
cuggggcccuccugggaguc

SEQ ID NO: 32039 - RNA, 20 nt, Artificial Sequence
  spacer sequence CTCN PAM
ggcugcgaccucccuggggc

SEQ ID NO: 32040 - RNA, 20 nt, Artificial Sequence
  spacer sequence CTCN PAM
gaaacucugccccggccccc

SEQ ID NO: 32041 - RNA, 20 nt, Artificial Sequence
  spacer sequence CTCN PAM
gccccggcccccgcagggag

SEQ ID NO: 32042 - RNA, 20 nt, Artificial Sequence
  spacer sequence CTCN PAM
cugcgggggccggggcagag

SEQ ID NO: 32043 - RNA, 20 nt, Artificial Sequence
  spacer sequence CTCN PAM
agucucccugcgggggccgg

SEQ ID NO: 32044 - RNA, 20 nt, Artificial Sequence
  spacer sequence CTCN PAM
gccaacuccagucucccugc

SEQ ID NO: 32045 - RNA, 20 nt, Artificial Sequence
  spacer sequence CTCN PAM
ccaaccccgacgcacgcguc

SEQ ID NO: 32046 - RNA, 20 nt, Artificial Sequence
  spacer sequence CTCN PAM
ccugcccgguuccagcgcua

SEQ ID NO: 32047 - RNA, 20 nt, Artificial Sequence
  spacer sequence CTCN PAM
caccugcccgguuccagcgc

SEQ ID NO: 32048 - RNA, 20 nt, Artificial Sequence
  spacer sequence CTCN PAM
acccggcccggcccuggguc

SEQ ID NO: 32049 - RNA, 20 nt, Artificial Sequence
  spacer sequence CTCN PAM
cgcgcccccacgcgcuccac

SEQ ID NO: 32050 - RNA, 20 nt, Artificial Sequence
  spacer sequence CTCN PAM
gagaccccaggccgggccac

SEQ ID NO: 32051 - RNA, 20 nt, Artificial Sequence
  spacer sequence CTCN PAM
gaggggcgggggcgcacccu

SEQ ID NO: 32052 - RNA, 20 nt, Artificial Sequence
  spacer sequence CTCN PAM
ucccccggggccugccccca

SEQ ID NO: 32053 - RNA, 20 nt, Artificial Sequence
  spacer sequence CTCN PAM
ggcucgucccccggggccug

SEQ ID NO: 32054 - RNA, 20 nt, Artificial Sequence
  spacer sequence CTCN PAM
agccugcgcccgcccccugc

SEQ ID NO: 32055 - RNA, 20 nt, Artificial Sequence
  spacer sequence CTCN PAM
cgccgugccccggccgcgcg

SEQ ID NO: 32056 - RNA, 20 nt, Artificial Sequence
  spacer sequence CTCN PAM
cgacgcucgggcgggacaaa

SEQ ID NO: 32057 - RNA, 20 nt, Artificial Sequence
  spacer sequence CTCN PAM
ggcgggacaaaggccggagc

SEQ ID NO: 32058 - RNA, 20 nt, Artificial Sequence
  spacer sequence CTCN PAM
ggccuuugucccgcccgagc

SEQ ID NO: 32059 - RNA, 20 nt, Artificial Sequence
  spacer sequence CTCN PAM
ccggcgggugcggcggcggc

SEQ ID NO: 32060 - RNA, 20 nt, Artificial Sequence
  spacer sequence CTCN PAM
gacaguccgcgcggccgggu

SEQ ID NO: 32061 - RNA, 20 nt, Artificial Sequence
  spacer sequence CTCN PAM
gcgcccgaggucgcgcgcgc

SEQ ID NO: 32062 - RNA, 20 nt, Artificial Sequence
  spacer sequence CTCN PAM
ggcgccgagaagucaggcgg

SEQ ID NO: 32063 - RNA, 20 nt, Artificial Sequence
  spacer sequence CTCN PAM
gcgcgcgcgaccucgggcgc

SEQ ID NO: 32064 - RNA, 20 nt, Artificial Sequence
  spacer sequence CTCN PAM
aagcgccgccgcgcccuccu

SEQ ID NO: 32065 - RNA, 20 nt, Artificial Sequence
  spacer sequence CTCN PAM
ucccgcccgcccuccgcccg

SEQ ID NO: 32066 - RNA, 20 nt, Artificial Sequence
  spacer sequence CTCN PAM
cgcccgcccuccgcccgccc

SEQ ID NO: 32067 - RNA, 20 nt, Artificial Sequence
  spacer sequence CTCN PAM
gcccgcccgcucggcggcgg

SEQ ID NO: 32068 - RNA, 20 nt, Artificial Sequence
  spacer sequence CTCN PAM
gcggcggcggcggcggcgga

SEQ ID NO: 32069 - RNA, 20 nt, Artificial Sequence
  spacer sequence CTCN PAM
gccgccgccgccgccgccga

SEQ ID NO: 32070 - RNA, 20 nt, Artificial Sequence
  spacer sequence CTCN PAM
uccgccgccgccgccgccgc

SEQ ID NO: 32071 - RNA, 20 nt, Artificial Sequence
  spacer sequence CTCN PAM
gccuccuccgccgccgccgc

SEQ ID NO: 32072 - RNA, 20 nt, Artificial Sequence
  spacer sequence CTCN PAM
cggccgccgccugccagccu

SEQ ID NO: 32073 - RNA, 20 nt, Artificial Sequence
  spacer sequence CTCN PAM
cccggccgccgccugccagc

SEQ ID NO: 32074 - RNA, 20 nt, Artificial Sequence
  spacer sequence CTCN PAM
cucucccggccgccgccugc

SEQ ID NO: 32075 - RNA, 20 nt, Artificial Sequence
  spacer sequence CTCN PAM
cgcugcugcuccugcuguua

SEQ ID NO: 32076 - RNA, 20 nt, Artificial Sequence
  spacer sequence CTCN PAM
ugcuguuaccgcugccgccg

SEQ ID NO: 32077 - RNA, 20 nt, Artificial Sequence
  spacer sequence CTCN PAM
gcgcgcgcgaagggcggcgg

SEQ ID NO: 32078 - RNA, 20 nt, Artificial Sequence
  spacer sequence CTCN PAM
gaccgcuacgccgucuacug

SEQ ID NO: 32079 - RNA, 20 nt, Artificial Sequence
  spacer sequence CTCN PAM
ccugggguugcugcgguucc

SEQ ID NO: 32080 - RNA, 20 nt, Artificial Sequence
  spacer sequence CTCN PAM
cgcccccggagcuccgggcg

SEQ ID NO: 32081 - RNA, 20 nt, Artificial Sequence
  spacer sequence CTCN PAM
gggggcgcgaggccgggcgc

SEQ ID NO: 32082 - RNA, 20 nt, Artificial Sequence
  spacer sequence CTCN PAM
gggcgccccccacgcgcgcg

SEQ ID NO: 32083 - RNA, 20 nt, Artificial Sequence
  spacer sequence CTCN PAM
cgcgggaaccgggcgcccgc

SEQ ID NO: 32084 - RNA, 20 nt, Artificial Sequence
  spacer sequence CTCN PAM
cuggggggcucccgcgggaa

SEQ ID NO: 32085 - RNA, 20 nt, Artificial Sequence
  spacer sequence CTCN PAM
ggccccccggaguuuggggg

SEQ ID NO: 32086 - RNA, 20 nt, Artificial Sequence
  spacer sequence CTCN PAM
ggggggccggagcucccugg

SEQ ID NO: 32087 - RNA, 20 nt, Artificial Sequence
  spacer sequence CTCN PAM
cccuuuucgcgccugccuuc

SEQ ID NO: 32088 - RNA, 20 nt, Artificial Sequence
  spacer sequence CTCN PAM
cgccccacaucccccagagc

SEQ ID NO: 32089 - RNA, 20 nt, Artificial Sequence
  spacer sequence CTCN PAM
gggggauguggggcgcgagu

SEQ ID NO: 32090 - RNA, 20 nt, Artificial Sequence
  spacer sequence CTCN PAM
uggaguuuggggaaccccuc

SEQ ID NO: 32091 - RNA, 20 nt, Artificial Sequence
  spacer sequence CTCN PAM
aggagacgucggcgcucugg

SEQ ID NO: 32092 - RNA, 20 nt, Artificial Sequence
  spacer sequence CTCN PAM
gguacccuccgaugccgggu

SEQ ID NO: 32093 - RNA, 20 nt, Artificial Sequence
  spacer sequence CTCN PAM
gaugccggguagccccugag

SEQ ID NO: 32094 - RNA, 20 nt, Artificial Sequence
  spacer sequence CTCN PAM
ggggcuacccggcaucggag

SEQ ID NO: 32095 - RNA, 20 nt, Artificial Sequence
  spacer sequence CTCN PAM
ggggagcccccucgguuucg

SEQ ID NO: 32096 - RNA, 20 nt, Artificial Sequence
  spacer sequence CTCN PAM
ccagagaagcggguggauca

SEQ ID NO: 32097 - RNA, 20 nt, Artificial Sequence
  spacer sequence CTCN PAM
guuucgcauuugguggggau

SEQ ID NO: 32098 - RNA, 20 nt, Artificial Sequence
  spacer sequence CTCN PAM
ggugccaagguccccgggga

SEQ ID NO: 32099 - RNA, 20 nt, Artificial Sequence
  spacer sequence CTCN PAM
agggaucucuggguucgucc

SEQ ID NO: 32100 - RNA, 20 nt, Artificial Sequence
  spacer sequence CTCN PAM
agggccacagucccccaccu

SEQ ID NO: 32101 - RNA, 20 nt, Artificial Sequence
  spacer sequence CTCN PAM
ggguucguccugcccgcagg

SEQ ID NO: 32102 - RNA, 20 nt, Artificial Sequence
  spacer sequence CTCN PAM
aacuuccccaaguucaucug

SEQ ID NO: 32103 - RNA, 20 nt, Artificial Sequence
  spacer sequence CTCN PAM
cucaggacccagcaucugcu

SEQ ID NO: 32104 - RNA, 20 nt, Artificial Sequence
  spacer sequence CTCN PAM
ggacccagcaucugcuucac

SEQ ID NO: 32105 - RNA, 20 nt, Artificial Sequence
  spacer sequence CTCN PAM
agggggccaagggcccagcu

SEQ ID NO: 32106 - RNA, 20 nt, Artificial Sequence
  spacer sequence CTCN PAM
uuucaaagcugggcccuugg

SEQ ID NO: 32107 - RNA, 20 nt, Artificial Sequence
  spacer sequence CTCN PAM
gucuccuuucaaagcugggc

SEQ ID NO: 32108 - RNA, 20 nt, Artificial Sequence
  spacer sequence CTCN PAM
ccggccccucagucuccuuu

SEQ ID NO: 32109 - RNA, 20 nt, Artificial Sequence
  spacer sequence CTCN PAM
cggggcugacccccagcucc

SEQ ID NO: 32110 - RNA, 20 nt, Artificial Sequence
  spacer sequence CTCN PAM
aucccacugccccucccggg

SEQ ID NO: 32111 - RNA, 20 nt, Artificial Sequence
  spacer sequence CTCN PAM
cuuguccucugggcgcugac

SEQ ID NO: 32112 - RNA, 20 nt, Artificial Sequence
  spacer sequence CTCN PAM
uguccucugggcgcugacca

SEQ ID NO: 32113 - RNA, 20 nt, Artificial Sequence
  spacer sequence CTCN PAM
gggcgcugaccaggaaacug

SEQ ID NO: 32114 - RNA, 20 nt, Artificial Sequence
  spacer sequence CTCN PAM
guuuccuggucagcgcccag

SEQ ID NO: 32115 - RNA, 20 nt, Artificial Sequence
  spacer sequence CTCN PAM
gcaccucaguuuccugguca

SEQ ID NO: 32116 - RNA, 20 nt, Artificial Sequence
  spacer sequence CTCN PAM
uccccucugcaccucaguuu

SEQ ID NO: 32117 - RNA, 20 nt, Artificial Sequence
  spacer sequence CTCN PAM
ucauccccucugcaccucag

SEQ ID NO: 32118 - RNA, 20 nt, Artificial Sequence
  spacer sequence CTCN PAM
aggucaugcaagggggggac

SEQ ID NO: 32119 - RNA, 20 nt, Artificial Sequence
  spacer sequence CTCN PAM
gccgggcguggcaggcaggg

SEQ ID NO: 32120 - RNA, 20 nt, Artificial Sequence
  spacer sequence CTCN PAM
ugucccccacguugugccug

SEQ ID NO: 32121 - RNA, 20 nt, Artificial Sequence
  spacer sequence CTCN PAM
gaccaacgggggcuucuccu

SEQ ID NO: 32122 - RNA, 20 nt, Artificial Sequence
  spacer sequence CTCN PAM
gaaccaucccagggucucca

SEQ ID NO: 32123 - RNA, 20 nt, Artificial Sequence
  spacer sequence CTCN PAM
aagacaggagcaggcugcag

SEQ ID NO: 32124 - RNA, 20 nt, Artificial Sequence
  spacer sequence CTCN PAM
ugucuuggagacccugggau

SEQ ID NO: 32125 - RNA, 20 nt, Artificial Sequence
  spacer sequence CTCN PAM
cacgggacccccagggaagc

SEQ ID NO: 32126 - RNA, 20 nt, Artificial Sequence
  spacer sequence CTCN PAM
ggagggagucagccccagca

SEQ ID NO: 32127 - RNA, 20 nt, Artificial Sequence
  spacer sequence CTCN PAM
cgagccccaggacccccaaa

SEQ ID NO: 32128 - RNA, 20 nt, Artificial Sequence
  spacer sequence CTCN PAM
cucccgagccccaggacccc

SEQ ID NO: 32129 - RNA, 20 nt, Artificial Sequence
  spacer sequence CTCN PAM
gggugucaccgucuuccuaa

SEQ ID NO: 32130 - RNA, 20 nt, Artificial Sequence
  spacer sequence CTCN PAM
gugugccuuaggaagacggu

SEQ ID NO: 32131 - RNA, 20 nt, Artificial Sequence
  spacer sequence CTCN PAM
gcccccgaugugcagcuccg

SEQ ID NO: 32132 - RNA, 20 nt, Artificial Sequence
  spacer sequence CTCN PAM
ucugcuacuggucacuuucu

SEQ ID NO: 32133 - RNA, 20 nt, Artificial Sequence
  spacer sequence CTCN PAM
ccguuuuccagccgcuuccu

SEQ ID NO: 32134 - RNA, 20 nt, Artificial Sequence
  spacer sequence CTCN PAM
guuuuccagccgcuuccugu

SEQ ID NO: 32135 - RNA, 20 nt, Artificial Sequence
  spacer sequence CTCN PAM
gucggcacaggaagcggcug

SEQ ID NO: 32136 - RNA, 20 nt, Artificial Sequence
  spacer sequence CTCN PAM
ggagcccgccaccccuccuu

SEQ ID NO: 32137 - RNA, 20 nt, Artificial Sequence
  spacer sequence CTCN PAM
agagggcggcucggucggca

SEQ ID NO: 32138 - RNA, 20 nt, Artificial Sequence
  spacer sequence CTCN PAM
uuguccccucugucuccugc

SEQ ID NO: 32139 - RNA, 20 nt, Artificial Sequence
  spacer sequence CTCN PAM
gucuccugcuguccucgguc

SEQ ID NO: 32140 - RNA, 20 nt, Artificial Sequence
  spacer sequence CTCN PAM
ugcuguccucgguccccggg

SEQ ID NO: 32141 - RNA, 20 nt, Artificial Sequence
  spacer sequence CTCN PAM
guccccgggaggaaaguugc

SEQ ID NO: 32142 - RNA, 20 nt, Artificial Sequence
  spacer sequence CTCN PAM
cggggaccgaggacagcagg

SEQ ID NO: 32143 - RNA, 20 nt, Artificial Sequence
  spacer sequence CTCN PAM
uugaggcgggcucggggaca

SEQ ID NO: 32144 - RNA, 20 nt, Artificial Sequence
  spacer sequence CTCN PAM
aagagaccccuucaugcaac

SEQ ID NO: 32145 - RNA, 20 nt, Artificial Sequence
  spacer sequence CTCN PAM
gggacaagggcggcccgugu

SEQ ID NO: 32146 - RNA, 20 nt, Artificial Sequence
  spacer sequence CTCN PAM
ggucgggcccugggggcuga

SEQ ID NO: 32147 - RNA, 20 nt, Artificial Sequence
  spacer sequence CTCN PAM
gcccccagggcccgacccga

SEQ ID NO: 32148 - RNA, 20 nt, Artificial Sequence
  spacer sequence CTCN PAM
gagcggguccccgagccgcc

SEQ ID NO: 32149 - RNA, 20 nt, Artificial Sequence
  spacer sequence CTCN PAM
gaggugggccagccgucccc

SEQ ID NO: 32150 - RNA, 20 nt, Artificial Sequence
  spacer sequence CTCN PAM
gggacccgcucugagguggg

SEQ ID NO: 32151 - RNA, 20 nt, Artificial Sequence
  spacer sequence CTCN PAM
ccgcacggccagcgacagcc

SEQ ID NO: 32152 - RNA, 20 nt, Artificial Sequence
  spacer sequence CTCN PAM
cguccccagcguggccuguc

SEQ ID NO: 32153 - RNA, 20 nt, Artificial Sequence
  spacer sequence CTCN PAM
uguguuuggcguuugcuaga

SEQ ID NO: 32154 - RNA, 20 nt, Artificial Sequence
  spacer sequence CTCN PAM
cccgguugccggguccucgu

SEQ ID NO: 32155 - RNA, 20 nt, Artificial Sequence
  spacer sequence CTCN PAM
ccagugccuggcuuggccca

SEQ ID NO: 32156 - RNA, 20 nt, Artificial Sequence
  spacer sequence CTCN PAM
uguugcuccgggucugaccu

SEQ ID NO: 32157 - RNA, 20 nt, Artificial Sequence
  spacer sequence CTCN PAM
gggucugaccugguugccca

SEQ ID NO: 32158 - RNA, 20 nt, Artificial Sequence
  spacer sequence CTCN PAM
aaccgcugccugagggaacg

SEQ ID NO: 32159 - RNA, 20 nt, Artificial Sequence
  spacer sequence CTCN PAM
ggcagcgguuugagcugggc

SEQ ID NO: 32160 - RNA, 20 nt, Artificial Sequence
  spacer sequence CTCN PAM
gcggaccagcaaggccguuc

SEQ ID NO: 32161 - RNA, 20 nt, Artificial Sequence
  spacer sequence CTCN PAM
gugcugcccaggucggcucu

SEQ ID NO: 32162 - RNA, 20 nt, Artificial Sequence
  spacer sequence CTCN PAM
uccuuccucuccugccugcg

SEQ ID NO: 32163 - RNA, 20 nt, Artificial Sequence
  spacer sequence CTCN PAM
uuccucuccugccugcggua

SEQ ID NO: 32164 - RNA, 20 nt, Artificial Sequence
  spacer sequence CTCN PAM
ccugccugcgguauccaggg

SEQ ID NO: 32165 - RNA, 20 nt, Artificial Sequence
  spacer sequence CTCN PAM
ugccugcgguauccaggguu

SEQ ID NO: 32166 - RNA, 20 nt, Artificial Sequence
  spacer sequence CTCN PAM
guccccagcaacccuggaua

SEQ ID NO: 32167 - RNA, 20 nt, Artificial Sequence
  spacer sequence CTCN PAM
cccagcccugggccccacug

SEQ ID NO: 32168 - RNA, 20 nt, Artificial Sequence
  spacer sequence CTCN PAM
gcaguucucagauuuggugu

SEQ ID NO: 32169 - RNA, 20 nt, Artificial Sequence
  spacer sequence CTCN PAM
gauuugguguccaggggcac

SEQ ID NO: 32170 - RNA, 20 nt, Artificial Sequence
  spacer sequence CTCN PAM
ggcacaggucccgggcaggu

SEQ ID NO: 32171 - RNA, 20 nt, Artificial Sequence
  spacer sequence CTCN PAM
guauccaaggggacccugug

SEQ ID NO: 32172 - RNA, 20 nt, Artificial Sequence
  spacer sequence CTCN PAM
acaggguccccuuggauacg

SEQ ID NO: 32173 - RNA, 20 nt, Artificial Sequence
  spacer sequence CTCN PAM
ccaagccgauguccccucca

SEQ ID NO: 32174 - RNA, 20 nt, Artificial Sequence
  spacer sequence CTCN PAM
ccccaagccgauguccccuc

SEQ ID NO: 32175 - RNA, 20 nt, Artificial Sequence
  spacer sequence CTCN PAM
ucuccccaagccgauguccc

SEQ ID NO: 32176 - RNA, 20 nt, Artificial Sequence
  spacer sequence CTCN PAM
gccugagagaccuccuuugc

SEQ ID NO: 32177 - RNA, 20 nt, Artificial Sequence
  spacer sequence CTCN PAM
cucugccugagagaccuccu

SEQ ID NO: 32178 - RNA, 20 nt, Artificial Sequence
  spacer sequence CTCN PAM
gaugucugacccaggugggc

SEQ ID NO: 32179 - RNA, 20 nt, Artificial Sequence
  spacer sequence CTCN PAM
gucccucugaugucugaccc

SEQ ID NO: 32180 - RNA, 20 nt, Artificial Sequence
  spacer sequence CTCN PAM
gucucugucccucugauguc

SEQ ID NO: 32181 - RNA, 20 nt, Artificial Sequence
  spacer sequence CTCN PAM
cugucucugucccucugaug

SEQ ID NO: 32182 - RNA, 20 nt, Artificial Sequence
  spacer sequence CTCN PAM
gucucucugucucugucccu

SEQ ID NO: 32183 - RNA, 20 nt, Artificial Sequence
  spacer sequence CTCN PAM
gacugucucugucucucugu

SEQ ID NO: 32184 - RNA, 20 nt, Artificial Sequence
  spacer sequence CTCN PAM
gucucugacugucucugucu

SEQ ID NO: 32185 - RNA, 20 nt, Artificial Sequence
  spacer sequence CTCN PAM
cugucucugacugucucugu

SEQ ID NO: 32186 - RNA, 20 nt, Artificial Sequence
  spacer sequence CTCN PAM
cuuugucucucugucucuga

SEQ ID NO: 32187 - RNA, 20 nt, Artificial Sequence
  spacer sequence CTCN PAM
gucucccuuugucucucugu

SEQ ID NO: 32188 - RNA, 20 nt, Artificial Sequence
  spacer sequence CTCN PAM
cugucucccuuugucucucu

SEQ ID NO: 32189 - RNA, 20 nt, Artificial Sequence
  spacer sequence CTCN PAM
cucugucucccuuugucucu

SEQ ID NO: 32190 - RNA, 20 nt, Artificial Sequence
  spacer sequence CTCN PAM
gucugccugcgucugucucu

SEQ ID NO: 32191 - RNA, 20 nt, Artificial Sequence
  spacer sequence CTCN PAM
gacucugucugccugcgucu

SEQ ID NO: 32192 - RNA, 20 nt, Artificial Sequence
  spacer sequence CTCN PAM
aucucugacucugucugccu

SEQ ID NO: 32193 - RNA, 20 nt, Artificial Sequence
  spacer sequence CTCN PAM
cuccaucucugacucugucu

SEQ ID NO: 32194 - RNA, 20 nt, Artificial Sequence
  spacer sequence CTCN PAM
uccucccuccaucucugacu

SEQ ID NO: 32195 - RNA, 20 nt, Artificial Sequence
  spacer sequence CTCN PAM
gucucuuccucccuccaucu

SEQ ID NO: 32196 - RNA, 20 nt, Artificial Sequence
  spacer sequence CTCN PAM
ccgucucuuccucccuccau

SEQ ID NO: 32197 - RNA, 20 nt, Artificial Sequence
  spacer sequence CTCN PAM
gucacugucucuccgucucu

SEQ ID NO: 32198 - RNA, 20 nt, Artificial Sequence
  spacer sequence CTCN PAM
uucugucucugucacugucu

SEQ ID NO: 32199 - RNA, 20 nt, Artificial Sequence
  spacer sequence CTCN PAM
gucuccuucugucucuguca

SEQ ID NO: 32200 - RNA, 20 nt, Artificial Sequence
  spacer sequence CTCN PAM
gucucugucuccuucugucu

SEQ ID NO: 32201 - RNA, 20 nt, Artificial Sequence
  spacer sequence CTCN PAM
cugucucugucuccuucugu

SEQ ID NO: 32202 - RNA, 20 nt, Artificial Sequence
  spacer sequence CTCN PAM
gucucucugucucugucucc

SEQ ID NO: 32203 - RNA, 20 nt, Artificial Sequence
  spacer sequence CTCN PAM
gucucugucucucugucucu

SEQ ID NO: 32204 - RNA, 20 nt, Artificial Sequence
  spacer sequence CTCN PAM
cucugucucugucucucugu

SEQ ID NO: 32205 - RNA, 20 nt, Artificial Sequence
  spacer sequence CTCN PAM
gucucccucugucucugucu

SEQ ID NO: 32206 - RNA, 20 nt, Artificial Sequence
  spacer sequence CTCN PAM
cugucucccucugucucugu

SEQ ID NO: 32207 - RNA, 20 nt, Artificial Sequence
  spacer sequence CTCN PAM
aaagcuucacuguggcagaa

SEQ ID NO: 32208 - RNA, 20 nt, Artificial Sequence
  spacer sequence CTCN PAM
ucuuuucccaucacggguug

SEQ ID NO: 32209 - RNA, 20 nt, Artificial Sequence
  spacer sequence CTCN PAM
acccgugaugggaaaagaag

SEQ ID NO: 32210 - RNA, 20 nt, Artificial Sequence
  spacer sequence CTCN PAM
aauuucucaacccgugaugg

SEQ ID NO: 32211 - RNA, 20 nt, Artificial Sequence
  spacer sequence CTCN PAM
cuccaauuucucaacccgug

SEQ ID NO: 32212 - RNA, 20 nt, Artificial Sequence
  spacer sequence CTCN PAM
ggcaggcagcaggccccaga

SEQ ID NO: 32213 - RNA, 20 nt, Artificial Sequence
  spacer sequence CTCN PAM
ggcgggaaaaggggcuggcu

SEQ ID NO: 32214 - RNA, 20 nt, Artificial Sequence
  spacer sequence CTCN PAM
cgucaguccccgggggggcc

SEQ ID NO: 32215 - RNA, 20 nt, Artificial Sequence
  spacer sequence CTCN PAM
ucaguccccgggggggccca

SEQ ID NO: 32216 - RNA, 20 nt, Artificial Sequence
  spacer sequence CTCN PAM
gggaacauccagaccugggu

SEQ ID NO: 32217 - RNA, 20 nt, Artificial Sequence
  spacer sequence CTCN PAM
gcaagugcccgggggauccg

SEQ ID NO: 32218 - RNA, 20 nt, Artificial Sequence
  spacer sequence CTCN PAM
gguccccgugccaguuucca

SEQ ID NO: 32219 - RNA, 20 nt, Artificial Sequence
  spacer sequence CTCN PAM
cggcccccgggaccccccug

SEQ ID NO: 32220 - RNA, 20 nt, Artificial Sequence
  spacer sequence CTCN PAM
ugggucccacuuuacagaug

SEQ ID NO: 32221 - RNA, 20 nt, Artificial Sequence
  spacer sequence CTCN PAM
aucuguaaagugggacccag

SEQ ID NO: 32222 - RNA, 20 nt, Artificial Sequence
  spacer sequence CTCN PAM
guuccuccaucuguaaagug

SEQ ID NO: 32223 - RNA, 20 nt, Artificial Sequence
  spacer sequence CTCN PAM
aaucuucgcccggccugagu

SEQ ID NO: 32224 - RNA, 20 nt, Artificial Sequence
  spacer sequence CTCN PAM
ggccgggcgaagauuagagu

SEQ ID NO: 32225 - RNA, 20 nt, Artificial Sequence
  spacer sequence CTCN PAM
ggcccugggaaucggcaaac

SEQ ID NO: 32226 - RNA, 20 nt, Artificial Sequence
  spacer sequence CTCN PAM
ggcgaguguguguguaacgc

SEQ ID NO: 32227 - RNA, 20 nt, Artificial Sequence
  spacer sequence CTCN PAM
ccggagcgcucgggcccugg

SEQ ID NO: 32228 - RNA, 20 nt, Artificial Sequence
  spacer sequence CTCN PAM
cccuggacgccucgaguuua

SEQ ID NO: 32229 - RNA, 20 nt, Artificial Sequence
  spacer sequence CTCN PAM
cuggacgccucgaguuuagg

SEQ ID NO: 32230 - RNA, 20 nt, Artificial Sequence
  spacer sequence CTCN PAM
aguuuaggaaacggcggagc

SEQ ID NO: 32231 - RNA, 20 nt, Artificial Sequence
  spacer sequence CTCN PAM
aggcguccagggagagggcg

SEQ ID NO: 32232 - RNA, 20 nt, Artificial Sequence
  spacer sequence CTCN PAM
gccguuuccuaaacucgagg

SEQ ID NO: 32233 - RNA, 20 nt, Artificial Sequence
  spacer sequence CTCN PAM
gcccgugcacgcccggcgga

SEQ ID NO: 32234 - RNA, 20 nt, Artificial Sequence
  spacer sequence CTCN PAM
gccgggcgugcacgggccga

SEQ ID NO: 32235 - RNA, 20 nt, Artificial Sequence
  spacer sequence CTCN PAM
aucuuuacgccggccguugu

SEQ ID NO: 32236 - RNA, 20 nt, Artificial Sequence
  spacer sequence CTCN PAM
uuaagccuccaucuuuacgc

SEQ ID NO: 32237 - RNA, 20 nt, Artificial Sequence
  spacer sequence CTCN PAM
cgaagaugccccgugcaaag

SEQ ID NO: 32238 - RNA, 20 nt, Artificial Sequence
  spacer sequence CTCN PAM
caagcccacggccgggcccu

SEQ ID NO: 32239 - RNA, 20 nt, Artificial Sequence
  spacer sequence CTCN PAM
gggggugugaggagcugagc

SEQ ID NO: 32240 - RNA, 20 nt, Artificial Sequence
  spacer sequence CTCN PAM
cacccccugagccucccaag

SEQ ID NO: 32241 - RNA, 20 nt, Artificial Sequence
  spacer sequence CTCN PAM
ucacacccccugagccuccc

SEQ ID NO: 32242 - RNA, 20 nt, Artificial Sequence
  spacer sequence CTCN PAM
gcuccucacacccccugagc

SEQ ID NO: 32243 - RNA, 20 nt, Artificial Sequence
  spacer sequence CTCN PAM
ggcgcucagcuccucacacc

SEQ ID NO: 32244 - RNA, 20 nt, Artificial Sequence
  spacer sequence CTCN PAM
gcuccggcgcucagcuccuc

SEQ ID NO: 32245 - RNA, 20 nt, Artificial Sequence
  spacer sequence CTCN PAM
cugcuccggcgcucagcucc

SEQ ID NO: 32246 - RNA, 20 nt, Artificial Sequence
  spacer sequence CTCN PAM
cucugcuccggcgcucagcu

SEQ ID NO: 32247 - RNA, 20 nt, Artificial Sequence
  spacer sequence CTCN PAM
gcucucucugcuccggcgcu

SEQ ID NO: 32248 - RNA, 20 nt, Artificial Sequence
  spacer sequence CTCN PAM
ccgcucucucugcuccggcg

SEQ ID NO: 32249 - RNA, 20 nt, Artificial Sequence
  spacer sequence CTCN PAM
gggaggccaggaaggaaugc

SEQ ID NO: 32250 - RNA, 20 nt, Artificial Sequence
  spacer sequence CTCN PAM
cagagccaucccagcgcccc

SEQ ID NO: 32251 - RNA, 20 nt, Artificial Sequence
  spacer sequence CTCN PAM
ggcccugccaggcugucuuc

SEQ ID NO: 32252 - RNA, 20 nt, Artificial Sequence
  spacer sequence CTCN PAM
uugguuugaagacagccugg

SEQ ID NO: 32253 - RNA, 20 nt, Artificial Sequence
  spacer sequence CTCN PAM
ggguuccuggcugugaaaug

SEQ ID NO: 32254 - RNA, 20 nt, Artificial Sequence
  spacer sequence CTCN PAM
aggcuggucuggugugggaa

SEQ ID NO: 32255 - RNA, 20 nt, Artificial Sequence
  spacer sequence CTCN PAM
agccaggcgccguggcucac

SEQ ID NO: 32256 - RNA, 20 nt, Artificial Sequence
  spacer sequence CTCN PAM
caccaacggggcacaguggc

SEQ ID NO: 32257 - RNA, 20 nt, Artificial Sequence
  spacer sequence CTCN PAM
caccaacagggcacaguagc

SEQ ID NO: 32258 - RNA, 20 nt, Artificial Sequence
  spacer sequence CTCN PAM
cacccgccgggcacgguggu

SEQ ID NO: 32259 - RNA, 20 nt, Artificial Sequence
  spacer sequence CTCN PAM
cacccgccgggcacaguggu

SEQ ID NO: 32260 - RNA, 20 nt, Artificial Sequence
  spacer sequence CTCN PAM
aacccgcugggcacaguggc

SEQ ID NO: 32261 - RNA, 20 nt, Artificial Sequence
  spacer sequence CTCN PAM
caaagugcugggauuacagg

SEQ ID NO: 32262 - RNA, 20 nt, Artificial Sequence
  spacer sequence CTCN PAM
guuuuuguaaucauaaaaca

SEQ ID NO: 32263 - RNA, 20 nt, Artificial Sequence
  spacer sequence CTCN PAM
aguggaauugugaaaauuaa

SEQ ID NO: 32264 - RNA, 20 nt, Artificial Sequence
  spacer sequence CTCN PAM
guuuugcuaguuuggguguu

SEQ ID NO: 32265 - RNA, 20 nt, Artificial Sequence
  spacer sequence CTCN PAM
auuuuccaucuugcuuaaau

SEQ ID NO: 32266 - RNA, 20 nt, Artificial Sequence
  spacer sequence CTCN PAM
aacuucccccuucccugaca

SEQ ID NO: 32267 - RNA, 20 nt, Artificial Sequence
  spacer sequence CTCN PAM
uaggggugggaagaggaggc

SEQ ID NO: 32268 - RNA, 20 nt, Artificial Sequence
  spacer sequence CTCN PAM
ucccaccccuaagaggucau

SEQ ID NO: 32269 - RNA, 20 nt, Artificial Sequence
  spacer sequence CTCN PAM
ucuucccaccccuaagaggu

SEQ ID NO: 32270 - RNA, 20 nt, Artificial Sequence
  spacer sequence CTCN PAM
caaccccaaagccuccucuu

SEQ ID NO: 32271 - RNA, 20 nt, Artificial Sequence
  spacer sequence CTCN PAM
gaccucacaaccccaaagcc

SEQ ID NO: 32272 - RNA, 20 nt, Artificial Sequence
  spacer sequence CTCN PAM
ucccaaaguaagggggcuca

SEQ ID NO: 32273 - RNA, 20 nt, Artificial Sequence
  spacer sequence CTCN PAM
ucugcagaaugcggugaugu

SEQ ID NO: 32274 - RNA, 20 nt, Artificial Sequence
  spacer sequence CTCN PAM
gcagaaugcggugauguugc

SEQ ID NO: 32275 - RNA, 20 nt, Artificial Sequence
  spacer sequence CTCN PAM
cagcuaucccggaccccuua

SEQ ID NO: 32276 - RNA, 20 nt, Artificial Sequence
  spacer sequence CTCN PAM
ugcgaucacugaugucuuuc

SEQ ID NO: 32277 - RNA, 20 nt, Artificial Sequence
  spacer sequence CTCN PAM
cccaacugagcuauuucggc

SEQ ID NO: 32278 - RNA, 20 nt, Artificial Sequence
  spacer sequence CTCN PAM
caacugagcuauuucggcug

SEQ ID NO: 32279 - RNA, 20 nt, Artificial Sequence
  spacer sequence CTCN PAM
guugggagagcguuagacug

SEQ ID NO: 32280 - RNA, 20 nt, Artificial Sequence
  spacer sequence CTCN PAM
gccgcccagccgaaauagcu

SEQ ID NO: 32281 - RNA, 20 nt, Artificial Sequence
  spacer sequence CTCN PAM
cgccgggacuccgucccgcg

SEQ ID NO: 32282 - RNA, 20 nt, Artificial Sequence
  spacer sequence CTCN PAM
ccgggacuccgucccgcgcu

SEQ ID NO: 32283 - RNA, 20 nt, Artificial Sequence
  spacer sequence CTCN PAM
gucccgcgcugcgccuuccc

SEQ ID NO: 32284 - RNA, 20 nt, Artificial Sequence
  spacer sequence CTCN PAM
cagggcgccggagcgcagug

SEQ ID NO: 32285 - RNA, 20 nt, Artificial Sequence
  spacer sequence CTCN PAM
ggcgcccugggagaccuuac

SEQ ID NO: 32286 - RNA, 20 nt, Artificial Sequence
  spacer sequence CTCN PAM
guggcgcaaucgguuagcgc

SEQ ID NO: 32287 - RNA, 20 nt, Artificial Sequence
  spacer sequence CTCN PAM
aaccaccaaccuuucgguua

SEQ ID NO: 32288 - RNA, 20 nt, Artificial Sequence
  spacer sequence CTCN PAM
uggaauaacaagaaaaugag

SEQ ID NO: 32289 - RNA, 20 nt, Artificial Sequence
  spacer sequence CTCN PAM
uuuucuuguuauuccaggag

SEQ ID NO: 32290 - RNA, 20 nt, Artificial Sequence
  spacer sequence CTCN PAM
guuuuugucgguccgccgca

SEQ ID NO: 32291 - RNA, 20 nt, Artificial Sequence
  spacer sequence CTCN PAM
gaugaccuuuccgccucggg

SEQ ID NO: 32292 - RNA, 20 nt, Artificial Sequence
  spacer sequence CTCN PAM
ggugaucugggggugcacgg

SEQ ID NO: 32293 - RNA, 20 nt, Artificial Sequence
  spacer sequence CTCN PAM
guggucguguugcgccgugc

SEQ ID NO: 32294 - RNA, 20 nt, Artificial Sequence
  spacer sequence CTCN PAM
cggcuccagguuccgguuuc

SEQ ID NO: 32295 - RNA, 20 nt, Artificial Sequence
  spacer sequence CTCN PAM
agguuccgguuuccgcaugc

SEQ ID NO: 32296 - RNA, 20 nt, Artificial Sequence
  spacer sequence CTCN PAM
gagccgcuuugggcggcggc

SEQ ID NO: 32297 - RNA, 20 nt, Artificial Sequence
  spacer sequence CTCN PAM
gagcgcaugcggaaaccgga

SEQ ID NO: 32298 - RNA, 20 nt, Artificial Sequence
  spacer sequence CTCN PAM
ggguucccggggccgccgcc

SEQ ID NO: 32299 - RNA, 20 nt, Artificial Sequence
  spacer sequence CTCN PAM
uuagcgcuccggguucccgg

SEQ ID NO: 32300 - RNA, 20 nt, Artificial Sequence
  spacer sequence CTCN PAM
gagguugucugaaggccgag

SEQ ID NO: 32301 - RNA, 20 nt, Artificial Sequence
  spacer sequence CTCN PAM
gagguccguucuccuuagcg

SEQ ID NO: 32302 - RNA, 20 nt, Artificial Sequence
  spacer sequence CTCN PAM
gccuucagacaaccucugag

SEQ ID NO: 32303 - RNA, 20 nt, Artificial Sequence
  spacer sequence CTCN PAM
ccugacagcaccgccaucuu

SEQ ID NO: 32304 - RNA, 20 nt, Artificial Sequence
  spacer sequence CTCN PAM
cacggccccagacccgcgcg

SEQ ID NO: 32305 - RNA, 20 nt, Artificial Sequence
  spacer sequence CTCN PAM
ggugucgugguggcgucggg

SEQ ID NO: 32306 - RNA, 20 nt, Artificial Sequence
  spacer sequence CTCN PAM
ccgggcuucuccgagccggc

SEQ ID NO: 32307 - RNA, 20 nt, Artificial Sequence
  spacer sequence CTCN PAM
gggcuucuccgagccggccg

SEQ ID NO: 32308 - RNA, 20 nt, Artificial Sequence
  spacer sequence CTCN PAM
gagccggccgcuccucgggc

SEQ ID NO: 32309 - RNA, 20 nt, Artificial Sequence
  spacer sequence CTCN PAM
gagaagcccggagaggaccg

SEQ ID NO: 32310 - RNA, 20 nt, Artificial Sequence
  spacer sequence CTCN PAM
ucgggcuccccgcccggcuu

SEQ ID NO: 32311 - RNA, 20 nt, Artificial Sequence
  spacer sequence CTCN PAM
ggcuccccgcccggcuugcg

SEQ ID NO: 32312 - RNA, 20 nt, Artificial Sequence
  spacer sequence CTCN PAM
ccgcccggcuugcgaugaac

SEQ ID NO: 32313 - RNA, 20 nt, Artificial Sequence
  spacer sequence CTCN PAM
ggacgcaauaacggcgaccg

SEQ ID NO: 32314 - RNA, 20 nt, Artificial Sequence
  spacer sequence CTCN PAM
guuuccccgacuguacucug

SEQ ID NO: 32315 - RNA, 20 nt, Artificial Sequence
  spacer sequence CTCN PAM
agccucaggaaggcgcucgg

SEQ ID NO: 32316 - RNA, 20 nt, Artificial Sequence
  spacer sequence CTCN PAM
ggaaggcgcucgggguggag

SEQ ID NO: 32317 - RNA, 20 nt, Artificial Sequence
  spacer sequence CTCN PAM
ggguggaggcuggaggggcc

SEQ ID NO: 32318 - RNA, 20 nt, Artificial Sequence
  spacer sequence CTCN PAM
accccgagcgccuuccugag

SEQ ID NO: 32319 - RNA, 20 nt, Artificial Sequence
  spacer sequence CTCN PAM
agccuccaccccgagcgccu

SEQ ID NO: 32320 - RNA, 20 nt, Artificial Sequence
  spacer sequence CTCN PAM
gggacgugaauggggccccu

SEQ ID NO: 32321 - RNA, 20 nt, Artificial Sequence
  spacer sequence CTCN PAM
cgggccgugcccuggucucg

SEQ ID NO: 32322 - RNA, 20 nt, Artificial Sequence
  spacer sequence CTCN PAM
ugagaugcccuggagagagc

SEQ ID NO: 32323 - RNA, 20 nt, Artificial Sequence
  spacer sequence CTCN PAM
agagcagccucgcgggccgu

SEQ ID NO: 32324 - RNA, 20 nt, Artificial Sequence
  spacer sequence CTCN PAM
agggcaucucaagagcagcc

SEQ ID NO: 32325 - RNA, 20 nt, Artificial Sequence
  spacer sequence CTCN PAM
ccagggcaucucaagagcag

SEQ ID NO: 32326 - RNA, 20 nt, Artificial Sequence
  spacer sequence CTCN PAM
cuccagggcaucucaagagc

SEQ ID NO: 32327 - RNA, 20 nt, Artificial Sequence
  spacer sequence CTCN PAM
guuucccagccugucaggca

SEQ ID NO: 32328 - RNA, 20 nt, Artificial Sequence
  spacer sequence CTCN PAM
augggccucaguuucccagc

SEQ ID NO: 32329 - RNA, 20 nt, Artificial Sequence
  spacer sequence CTCN PAM
aagacccucaaugggccuca

SEQ ID NO: 32330 - RNA, 20 nt, Artificial Sequence
  spacer sequence CTCN PAM
accucccuccccaccccugg

SEQ ID NO: 32331 - RNA, 20 nt, Artificial Sequence
  spacer sequence CTCN PAM
cuccccaccccugggaggua

SEQ ID NO: 32332 - RNA, 20 nt, Artificial Sequence
  spacer sequence CTCN PAM
ccaccccugggagguaaggg

SEQ ID NO: 32333 - RNA, 20 nt, Artificial Sequence
  spacer sequence CTCN PAM
cagggguggggagggaggug

SEQ ID NO: 32334 - RNA, 20 nt, Artificial Sequence
  spacer sequence CTCN PAM
cgcagagccuguccugcucc

SEQ ID NO: 32335 - RNA, 20 nt, Artificial Sequence
  spacer sequence CTCN PAM
cagagccuguccugcuccag

SEQ ID NO: 32336 - RNA, 20 nt, Artificial Sequence
  spacer sequence CTCN PAM
gcgagaggcccuuaccuccc

SEQ ID NO: 32337 - RNA, 20 nt, Artificial Sequence
  spacer sequence CTCN PAM
agggacuuuuuugggaucag

SEQ ID NO: 32338 - RNA, 20 nt, Artificial Sequence
  spacer sequence CTCN PAM
gcucagauaaaguuauuaaa

SEQ ID NO: 32339 - RNA, 20 nt, Artificial Sequence
  spacer sequence CTCN PAM
gauaaaguuauuaaaugcau

SEQ ID NO: 32340 - RNA, 20 nt, Artificial Sequence
  spacer sequence CTCN PAM
guguaacugauuuccuugca

SEQ ID NO: 32341 - RNA, 20 nt, Artificial Sequence
  spacer sequence CTCN PAM
ccguguaacugauuuccuug

SEQ ID NO: 32342 - RNA, 20 nt, Artificial Sequence
  spacer sequence CTCN PAM
uuccaaaucacagucgcaau

SEQ ID NO: 32343 - RNA, 20 nt, Artificial Sequence
  spacer sequence CTCN PAM
cuccuuccaaaucacagucg

SEQ ID NO: 32344 - RNA, 20 nt, Artificial Sequence
  spacer sequence CTCN PAM
ucacuccuuccaaaucacag

SEQ ID NO: 32345 - RNA, 20 nt, Artificial Sequence
  spacer sequence CTCN PAM
uuuccacuccucacuccuuc

SEQ ID NO: 32346 - RNA, 20 nt, Artificial Sequence
  spacer sequence CTCN PAM
gucgcucagacuggagugca

SEQ ID NO: 32347 - RNA, 20 nt, Artificial Sequence
  spacer sequence CTCN PAM
gacuggagugcaguggugcc

SEQ ID NO: 32348 - RNA, 20 nt, Artificial Sequence
  spacer sequence CTCN PAM
agucugagcgacagaggcag

SEQ ID NO: 32349 - RNA, 20 nt, Artificial Sequence
  spacer sequence CTCN PAM
ucacugcaaccugugccucc

SEQ ID NO: 32350 - RNA, 20 nt, Artificial Sequence
  spacer sequence CTCN PAM
caggcucaagcgauucuggc

SEQ ID NO: 32351 - RNA, 20 nt, Artificial Sequence
  spacer sequence CTCN PAM
agcgauucuggcacuucagu

SEQ ID NO: 32352 - RNA, 20 nt, Artificial Sequence
  spacer sequence CTCN PAM
acuaaaaauacaaaaacuag

SEQ ID NO: 32353 - RNA, 20 nt, Artificial Sequence
  spacer sequence CTCN PAM
aacuucugaguucaagcaau

SEQ ID NO: 32354 - RNA, 20 nt, Artificial Sequence
  spacer sequence CTCN PAM
gaaguucgagaccagccugg

SEQ ID NO: 32355 - RNA, 20 nt, Artificial Sequence
  spacer sequence CTCN PAM
caccugagccucccaaagug

SEQ ID NO: 32356 - RNA, 20 nt, Artificial Sequence
  spacer sequence CTCN PAM
ggugggaggauugcuugaac

SEQ ID NO: 32357 - RNA, 20 nt, Artificial Sequence
  spacer sequence CTCN PAM
caaagugcugggagccacgg

SEQ ID NO: 32358 - RNA, 20 nt, Artificial Sequence
  spacer sequence CTCN PAM
cagcacuuugggaggcucag

SEQ ID NO: 32359 - RNA, 20 nt, Artificial Sequence
  spacer sequence CTCN PAM
ccaggccccuuguuaagaau

SEQ ID NO: 32360 - RNA, 20 nt, Artificial Sequence
  spacer sequence CTCN PAM
cgccuguaaucccagcacuu

SEQ ID NO: 32361 - RNA, 20 nt, Artificial Sequence
  spacer sequence CTCN PAM
ggugauccgcccaccuuggc

SEQ ID NO: 32362 - RNA, 20 nt, Artificial Sequence
  spacer sequence CTCN PAM
ggaccucaggugauccgccc

SEQ ID NO: 32363 - RNA, 20 nt, Artificial Sequence
  spacer sequence CTCN PAM
aacuccggaccucaggugau

SEQ ID NO: 32364 - RNA, 20 nt, Artificial Sequence
  spacer sequence CTCN PAM
auguuggccaggcuggucuc

SEQ ID NO: 32365 - RNA, 20 nt, Artificial Sequence
  spacer sequence CTCN PAM
acuaaaaauacaaaaucagc

SEQ ID NO: 32366 - RNA, 20 nt, Artificial Sequence
  spacer sequence CTCN PAM
ugccccagccccccaguagc

SEQ ID NO: 32367 - RNA, 20 nt, Artificial Sequence
  spacer sequence CTCN PAM
cugcgucuuuccucuguaca

SEQ ID NO: 32368 - RNA, 20 nt, Artificial Sequence
  spacer sequence CTCN PAM
guacauguuuguguccugau

SEQ ID NO: 32369 - RNA, 20 nt, Artificial Sequence
  spacer sequence CTCN PAM
uccgauaugacuuauguccu

SEQ ID NO: 32370 - RNA, 20 nt, Artificial Sequence
  spacer sequence CTCN PAM
ugaccucacuguccuuuaua

SEQ ID NO: 32371 - RNA, 20 nt, Artificial Sequence
  spacer sequence CTCN PAM
cuguccuuuauaaugacccu

SEQ ID NO: 32372 - RNA, 20 nt, Artificial Sequence
  spacer sequence CTCN PAM
aaaaauaaaauaaaggguca

SEQ ID NO: 32373 - RNA, 20 nt, Artificial Sequence
  spacer sequence CTCN PAM
aucucaaaaaauaaaauaaa

SEQ ID NO: 32374 - RNA, 20 nt, Artificial Sequence
  spacer sequence CTCN PAM
cucugucacccaagcuggag

SEQ ID NO: 32375 - RNA, 20 nt, Artificial Sequence
  spacer sequence CTCN PAM
gucacccaagcuggagugca

SEQ ID NO: 32376 - RNA, 20 nt, Artificial Sequence
  spacer sequence CTCN PAM
agcuugggugacagagggag

SEQ ID NO: 32377 - RNA, 20 nt, Artificial Sequence
  spacer sequence CTCN PAM
gcucacugcaaccucuaccu

SEQ ID NO: 32378 - RNA, 20 nt, Artificial Sequence
  spacer sequence CTCN PAM
cugcaaccucuaccucccgg

SEQ ID NO: 32379 - RNA, 20 nt, Artificial Sequence
  spacer sequence CTCN PAM
accucccggguucaagugau

SEQ ID NO: 32380 - RNA, 20 nt, Artificial Sequence
  spacer sequence CTCN PAM
cggguucaagugauucuccu

SEQ ID NO: 32381 - RNA, 20 nt, Artificial Sequence
  spacer sequence CTCN PAM
ugccucagccucucgaguag

SEQ ID NO: 32382 - RNA, 20 nt, Artificial Sequence
  spacer sequence CTCN PAM
gccucucgaguagcugggau

SEQ ID NO: 32383 - RNA, 20 nt, Artificial Sequence
  spacer sequence CTCN PAM
cgaguagcugggauuacagg

SEQ ID NO: 32384 - RNA, 20 nt, Artificial Sequence
  spacer sequence CTCN PAM
aguagcugggauuacaggua

SEQ ID NO: 32385 - RNA, 20 nt, Artificial Sequence
  spacer sequence CTCN PAM
agaggcugaggcaggagaau

SEQ ID NO: 32386 - RNA, 20 nt, Artificial Sequence
  spacer sequence CTCN PAM
acuaaaaauacaaaaauuag

SEQ ID NO: 32387 - RNA, 20 nt, Artificial Sequence
  spacer sequence CTCN PAM
aacuccugaccucaggugau

SEQ ID NO: 32388 - RNA, 20 nt, Artificial Sequence
  spacer sequence CTCN PAM
ugaccucaggugauccaccu

SEQ ID NO: 32389 - RNA, 20 nt, Artificial Sequence
  spacer sequence CTCN PAM
ggugauccaccugccucggc

SEQ ID NO: 32390 - RNA, 20 nt, Artificial Sequence
  spacer sequence CTCN PAM
gccuccugaagugcuggaau

SEQ ID NO: 32391 - RNA, 20 nt, Artificial Sequence
  spacer sequence CTCN PAM
ugaagugcuggaauuacagg

SEQ ID NO: 32392 - RNA, 20 nt, Artificial Sequence
  spacer sequence CTCN PAM
ugccuguaauuccagcacuu

SEQ ID NO: 32393 - RNA, 20 nt, Artificial Sequence
  spacer sequence CTCN PAM
aaaagcagucacauucugag

SEQ ID NO: 32394 - RNA, 20 nt, Artificial Sequence
  spacer sequence CTCN PAM
gaaugugacugcuuuuggag

SEQ ID NO: 32395 - RNA, 20 nt, Artificial Sequence
  spacer sequence CTCN PAM
acccgaccugcaucugaagc

SEQ ID NO: 32396 - RNA, 20 nt, Artificial Sequence
  spacer sequence CTCN PAM
caaggaagaauccagaaagg

SEQ ID NO: 32397 - RNA, 20 nt, Artificial Sequence
  spacer sequence CTCN PAM
agguuuccucccgcugagug

SEQ ID NO: 32398 - RNA, 20 nt, Artificial Sequence
  spacer sequence CTCN PAM
cgcugagugccccgggcgug

SEQ ID NO: 32399 - RNA, 20 nt, Artificial Sequence
  spacer sequence CTCN PAM
gcgggaggaaaccuggaggu

SEQ ID NO: 32400 - RNA, 20 nt, Artificial Sequence
  spacer sequence CTCN PAM
ggccuuagucuucgccucgg

SEQ ID NO: 32401 - RNA, 20 nt, Artificial Sequence
  spacer sequence CTCN PAM
ggaaggcucucccaggagac

SEQ ID NO: 32402 - RNA, 20 nt, Artificial Sequence
  spacer sequence CTCN PAM
cccaggagacuucgugcagg

SEQ ID NO: 32403 - RNA, 20 nt, Artificial Sequence
  spacer sequence CTCN PAM
caggagacuucgugcaggcg

SEQ ID NO: 32404 - RNA, 20 nt, Artificial Sequence
  spacer sequence CTCN PAM
ugggagagccuucccgaggc

SEQ ID NO: 32405 - RNA, 20 nt, Artificial Sequence
  spacer sequence CTCN PAM
ucugcgcuuccuuugaggcu

SEQ ID NO: 32406 - RNA, 20 nt, Artificial Sequence
  spacer sequence CTCN PAM
gcgcuuccuuugaggcuggc

SEQ ID NO: 32407 - RNA, 20 nt, Artificial Sequence
  spacer sequence CTCN PAM
aaggaagcgcagaggaggga

SEQ ID NO: 32408 - RNA, 20 nt, Artificial Sequence
  spacer sequence CTCN PAM
ucuaggggugcuuuucugug

SEQ ID NO: 32409 - RNA, 20 nt, Artificial Sequence
  spacer sequence CTCN PAM
aggggugcuuuucuguguag

SEQ ID NO: 32410 - RNA, 20 nt, Artificial Sequence
  spacer sequence CTCN PAM
ccgcuuagcggacugcagau

SEQ ID NO: 32411 - RNA, 20 nt, Artificial Sequence
  spacer sequence CTCN PAM
gcugcgugggaaacgcccga

SEQ ID NO: 32412 - RNA, 20 nt, Artificial Sequence
  spacer sequence CTCN PAM
ggcguuucccacgcagcuga

SEQ ID NO: 32413 - RNA, 20 nt, Artificial Sequence
  spacer sequence CTCN PAM
aggcccuggcugcugcucgg

SEQ ID NO: 32414 - RNA, 20 nt, Artificial Sequence
  spacer sequence CTCN PAM
gcugugccugacaagcgugu

SEQ ID NO: 32415 - RNA, 20 nt, Artificial Sequence
  spacer sequence CTCN PAM
uccuggccucagcugugccu

SEQ ID NO: 32416 - RNA, 20 nt, Artificial Sequence
  spacer sequence CTCN PAM
cugggcacccagugcucguc

SEQ ID NO: 32417 - RNA, 20 nt, Artificial Sequence
  spacer sequence CTCN PAM
agcaaugcuggggccucccu

SEQ ID NO: 32418 - RNA, 20 nt, Artificial Sequence
  spacer sequence CTCN PAM
aucuaugcgugcuugugggg

SEQ ID NO: 32419 - RNA, 20 nt, Artificial Sequence
  spacer sequence CTCN PAM
gguugccggcacccgguucu

SEQ ID NO: 32420 - RNA, 20 nt, Artificial Sequence
  spacer sequence CTCN PAM
ugagaaggggccagcagugu

SEQ ID NO: 32421 - RNA, 20 nt, Artificial Sequence
  spacer sequence CTCN PAM
ugaggcagguuucaguucag

SEQ ID NO: 32422 - RNA, 20 nt, Artificial Sequence
  spacer sequence CTCN PAM
cacuugcacacugcuggccc

SEQ ID NO: 32423 - RNA, 20 nt, Artificial Sequence
  spacer sequence CTCN PAM
cacuugcacacuggcugcug

SEQ ID NO: 32424 - RNA, 20 nt, Artificial Sequence
  spacer sequence CTCN PAM
ccgcccuggcgaucuucacu

SEQ ID NO: 32425 - RNA, 20 nt, Artificial Sequence
  spacer sequence CTCN PAM
agcaggggacuaagacucuc

SEQ ID NO: 32426 - RNA, 20 nt, Artificial Sequence
  spacer sequence CTCN PAM
cucguguucugaaaaccccc

SEQ ID NO: 32427 - RNA, 20 nt, Artificial Sequence
  spacer sequence CTCN PAM
cguguucugaaaacccccuc

SEQ ID NO: 32428 - RNA, 20 nt, Artificial Sequence
  spacer sequence CTCN PAM
uguucugaaaacccccucgu

SEQ ID NO: 32429 - RNA, 20 nt, Artificial Sequence
  spacer sequence CTCN PAM
uuaccuaacguuuguuaagu

SEQ ID NO: 32430 - RNA, 20 nt, Artificial Sequence
  spacer sequence CTCN PAM
aguugggaucagagcuaggc

SEQ ID NO: 32431 - RNA, 20 nt, Artificial Sequence
  spacer sequence CTCN PAM
agugccacuuaacaaacguu

SEQ ID NO: 32432 - RNA, 20 nt, Artificial Sequence
  spacer sequence CTCN PAM
gaucccaacucgagugccac

SEQ ID NO: 32433 - RNA, 20 nt, Artificial Sequence
  spacer sequence CTCN PAM
ugcccgcacagccuagcucu

SEQ ID NO: 32434 - RNA, 20 nt, Artificial Sequence
  spacer sequence CTCN PAM
aggcgcuuccccaucaggcu

SEQ ID NO: 32435 - RNA, 20 nt, Artificial Sequence
  spacer sequence CTCN PAM
cuguucccaccccguggucc

SEQ ID NO: 32436 - RNA, 20 nt, Artificial Sequence
  spacer sequence CTCN PAM
cugcagcuccuggccugcgc

SEQ ID NO: 32437 - RNA, 20 nt, Artificial Sequence
  spacer sequence CTCN PAM
gcagcuccuggccugcgcgg

SEQ ID NO: 32438 - RNA, 20 nt, Artificial Sequence
  spacer sequence CTCN PAM
uggccugcgcggcuuccgga

SEQ ID NO: 32439 - RNA, 20 nt, Artificial Sequence
  spacer sequence CTCN PAM
acugcccccggggugaccug

SEQ ID NO: 32440 - RNA, 20 nt, Artificial Sequence
  spacer sequence CTCN PAM
ccacugcccccggggugacc

SEQ ID NO: 32441 - RNA, 20 nt, Artificial Sequence
  spacer sequence CTCN PAM
cugugacuugacagcacaga

SEQ ID NO: 32442 - RNA, 20 nt, Artificial Sequence
  spacer sequence CTCN PAM
gugcugucaagucacaggga

SEQ ID NO: 32443 - RNA, 20 nt, Artificial Sequence
  spacer sequence CTCN PAM
cugugcugucaagucacagg

SEQ ID NO: 32444 - RNA, 20 nt, Artificial Sequence
  spacer sequence CTCN PAM
ugaccccaggauggaccucu

SEQ ID NO: 32445 - RNA, 20 nt, Artificial Sequence
  spacer sequence CTCN PAM
gcccaugccccuggcgucuu

SEQ ID NO: 32446 - RNA, 20 nt, Artificial Sequence
  spacer sequence CTCN PAM
caacuugccccauuggucug

SEQ ID NO: 32447 - RNA, 20 nt, Artificial Sequence
  spacer sequence CTCN PAM
ucccuccuugcagacugagc

SEQ ID NO: 32448 - RNA, 20 nt, Artificial Sequence
  spacer sequence CTCN PAM
cuccuugcagacugagcucc

SEQ ID NO: 32449 - RNA, 20 nt, Artificial Sequence
  spacer sequence CTCN PAM
uugcagacugagcuccuccc

SEQ ID NO: 32450 - RNA, 20 nt, Artificial Sequence
  spacer sequence CTCN PAM
gucugcaaggagggaggagu

SEQ ID NO: 32451 - RNA, 20 nt, Artificial Sequence
  spacer sequence CTCN PAM
ucccucccuggggaccgcgc

SEQ ID NO: 32452 - RNA, 20 nt, Artificial Sequence
  spacer sequence CTCN PAM
cucccuggggaccgcgcucc

SEQ ID NO: 32453 - RNA, 20 nt, Artificial Sequence
  spacer sequence CTCN PAM
cuggggaccgcgcuccuccc

SEQ ID NO: 32454 - RNA, 20 nt, Artificial Sequence
  spacer sequence CTCN PAM
ucccucccugcggacugugc

SEQ ID NO: 32455 - RNA, 20 nt, Artificial Sequence
  spacer sequence CTCN PAM
cucccugcggacugugcucc

SEQ ID NO: 32456 - RNA, 20 nt, Artificial Sequence
  spacer sequence CTCN PAM
cugcggacugugcucccugu

SEQ ID NO: 32457 - RNA, 20 nt, Artificial Sequence
  spacer sequence CTCN PAM
cugucuggggacugcgcucc

SEQ ID NO: 32458 - RNA, 20 nt, Artificial Sequence
  spacer sequence CTCN PAM
ucccuccuuggggaccgugc

SEQ ID NO: 32459 - RNA, 20 nt, Artificial Sequence
  spacer sequence CTCN PAM
cuccuuggggaccgugcucc

SEQ ID NO: 32460 - RNA, 20 nt, Artificial Sequence
  spacer sequence CTCN PAM
uuggggaccgugcuccuccc

SEQ ID NO: 32461 - RNA, 20 nt, Artificial Sequence
  spacer sequence CTCN PAM
ucccucccucccugcggacc

SEQ ID NO: 32462 - RNA, 20 nt, Artificial Sequence
  spacer sequence CTCN PAM
cucccucccugcggaccgcg

SEQ ID NO: 32463 - RNA, 20 nt, Artificial Sequence
  spacer sequence CTCN PAM
cucccugcggaccgcgcucc

SEQ ID NO: 32464 - RNA, 20 nt, Artificial Sequence
  spacer sequence CTCN PAM
cugcggaccgcgcuccuccc

SEQ ID NO: 32465 - RNA, 20 nt, Artificial Sequence
  spacer sequence CTCN PAM
ucccucccuggggaccgcgc

SEQ ID NO: 32466 - RNA, 20 nt, Artificial Sequence
  spacer sequence CTCN PAM
cucccuggggaccgcgcucc

SEQ ID NO: 32467 - RNA, 20 nt, Artificial Sequence
  spacer sequence CTCN PAM
cuggggaccgcgcuccuccc

SEQ ID NO: 32468 - RNA, 20 nt, Artificial Sequence
  spacer sequence CTCN PAM
ucccucccugcggaccgcgc

SEQ ID NO: 32469 - RNA, 20 nt, Artificial Sequence
  spacer sequence CTCN PAM
cucccugcggaccgcgcucg

SEQ ID NO: 32470 - RNA, 20 nt, Artificial Sequence
  spacer sequence CTCN PAM
cugcggaccgcgcucggccc

SEQ ID NO: 32471 - RNA, 20 nt, Artificial Sequence
  spacer sequence CTCN PAM
gcccucccuggggaccgcgc

SEQ ID NO: 32472 - RNA, 20 nt, Artificial Sequence
  spacer sequence CTCN PAM
cuggggaccgcgccccuccc

SEQ ID NO: 32473 - RNA, 20 nt, Artificial Sequence
  spacer sequence CTCN PAM
cucccagcggaccgcgcucc

SEQ ID NO: 32474 - RNA, 20 nt, Artificial Sequence
  spacer sequence CTCN PAM
cagcggaccgcgcuccuccc

SEQ ID NO: 32475 - RNA, 20 nt, Artificial Sequence
  spacer sequence CTCN PAM
ucccucccuggggaccucgc

SEQ ID NO: 32476 - RNA, 20 nt, Artificial Sequence
  spacer sequence CTCN PAM
cucccuggggaccucgcucc

SEQ ID NO: 32477 - RNA, 20 nt, Artificial Sequence
  spacer sequence CTCN PAM
cuggggaccucgcuccuccc

SEQ ID NO: 32478 - RNA, 20 nt, Artificial Sequence
  spacer sequence CTCN PAM
cuccucccucccucccugcg

SEQ ID NO: 32479 - RNA, 20 nt, Artificial Sequence
  spacer sequence CTCN PAM
ucccucccucccugcggacu

SEQ ID NO: 32480 - RNA, 20 nt, Artificial Sequence
  spacer sequence CTCN PAM
cucccucccugcggacugug

SEQ ID NO: 32481 - RNA, 20 nt, Artificial Sequence
  spacer sequence CTCN PAM
cucccugcggacugugcugc

SEQ ID NO: 32482 - RNA, 20 nt, Artificial Sequence
  spacer sequence CTCN PAM
cugcggacugugcugcuccc

SEQ ID NO: 32483 - RNA, 20 nt, Artificial Sequence
  spacer sequence CTCN PAM
cucccugcggacugugcuuc

SEQ ID NO: 32484 - RNA, 20 nt, Artificial Sequence
  spacer sequence CTCN PAM
cugcggacugugcuucuccc

SEQ ID NO: 32485 - RNA, 20 nt, Artificial Sequence
  spacer sequence CTCN PAM
cucccuuggagcagccugga

SEQ ID NO: 32486 - RNA, 20 nt, Artificial Sequence
  spacer sequence CTCN PAM
cuuggagcagccuggacuug

SEQ ID NO: 32487 - RNA, 20 nt, Artificial Sequence
  spacer sequence CTCN PAM
aagggagggagaagcacagu

SEQ ID NO: 32488 - RNA, 20 nt, Artificial Sequence
  spacer sequence CTCN PAM
ggcaaguccaggcugcucca

SEQ ID NO: 32489 - RNA, 20 nt, Artificial Sequence
  spacer sequence CTCN PAM
gccagguggggccuggccgc

SEQ ID NO: 32490 - RNA, 20 nt, Artificial Sequence
  spacer sequence CTCN PAM
ccuguuuccacuccugcugu

SEQ ID NO: 32491 - RNA, 20 nt, Artificial Sequence
  spacer sequence CTCN PAM
ugcuguccccguugggcccu

SEQ ID NO: 32492 - RNA, 20 nt, Artificial Sequence
  spacer sequence CTCN PAM
ugcucaagcccuuuguucug

SEQ ID NO: 32493 - RNA, 20 nt, Artificial Sequence
  spacer sequence CTCN PAM
agcccuuuguucugaaccug

SEQ ID NO: 32494 - RNA, 20 nt, Artificial Sequence
  spacer sequence CTCN PAM
uugcuggggaucccccaguc

SEQ ID NO: 32495 - RNA, 20 nt, Artificial Sequence
  spacer sequence CTCN PAM
ggcuuggggcucagaaagag

SEQ ID NO: 32496 - RNA, 20 nt, Artificial Sequence
  spacer sequence CTCN PAM
gaaagagggucaucgggucc

SEQ ID NO: 32497 - RNA, 20 nt, Artificial Sequence
  spacer sequence CTCN PAM
uucugagccccaagccagag

SEQ ID NO: 32498 - RNA, 20 nt, Artificial Sequence
  spacer sequence CTCN PAM
ugggaugcccgggcucuggg

SEQ ID NO: 32499 - RNA, 20 nt, Artificial Sequence
  spacer sequence CTCN PAM
gggccaccuccccucccucc

SEQ ID NO: 32500 - RNA, 20 nt, Artificial Sequence
  spacer sequence CTCN PAM
ccucccuccgcccagccucc

SEQ ID NO: 32501 - RNA, 20 nt, Artificial Sequence
  spacer sequence CTCN PAM
cuccgcccagccucccugcc

SEQ ID NO: 32502 - RNA, 20 nt, Artificial Sequence
  spacer sequence CTCN PAM
gcccagccucccugccucca

SEQ ID NO: 32503 - RNA, 20 nt, Artificial Sequence
  spacer sequence CTCN PAM
cugccuccaucuccguccag

SEQ ID NO: 32504 - RNA, 20 nt, Artificial Sequence
  spacer sequence CTCN PAM
aucuccguccagggcagccc

SEQ ID NO: 32505 - RNA, 20 nt, Artificial Sequence
  spacer sequence CTCN PAM
guccagggcagccccgggcc

SEQ ID NO: 32506 - RNA, 20 nt, Artificial Sequence
  spacer sequence CTCN PAM
ccacugcuaagugugucugc

SEQ ID NO: 32507 - RNA, 20 nt, Artificial Sequence
  spacer sequence CTCN PAM
gcagacacacuuagcagugg

SEQ ID NO: 32508 - RNA, 20 nt, Artificial Sequence
  spacer sequence CTCN PAM
augggggccagcgcucagca

SEQ ID NO: 32509 - RNA, 20 nt, Artificial Sequence
  spacer sequence CTCN PAM
ggacucaaugggggccagcg

SEQ ID NO: 32510 - RNA, 20 nt, Artificial Sequence
  spacer sequence CTCN PAM
cuaacccggcccccggcccc

SEQ ID NO: 32511 - RNA, 20 nt, Artificial Sequence
  spacer sequence CTCN PAM
gacaagacgcugaccucacu

SEQ ID NO: 32512 - RNA, 20 nt, Artificial Sequence
  spacer sequence CTCN PAM
cggacaagacgcugaccuca

SEQ ID NO: 32513 - RNA, 20 nt, Artificial Sequence
  spacer sequence CTCN PAM
ucccgggcugucacagggac

SEQ ID NO: 32514 - RNA, 20 nt, Artificial Sequence
  spacer sequence CTCN PAM
acccguggcucaucccgggc

SEQ ID NO: 32515 - RNA, 20 nt, Artificial Sequence
  spacer sequence CTCN PAM
ccugggcaaggccccacugc

SEQ ID NO: 32516 - RNA, 20 nt, Artificial Sequence
  spacer sequence CTCN PAM
uccugcagggaccuccccug

SEQ ID NO: 32517 - RNA, 20 nt, Artificial Sequence
  spacer sequence CTCN PAM
ccugcgccggcucccagucc

SEQ ID NO: 32518 - RNA, 20 nt, Artificial Sequence
  spacer sequence CTCN PAM
cagucccuggcacugcgccc

SEQ ID NO: 32519 - RNA, 20 nt, Artificial Sequence
  spacer sequence CTCN PAM
accuucagaggccggcccgg

SEQ ID NO: 32520 - RNA, 20 nt, Artificial Sequence
  spacer sequence CTCN PAM
gaagguggaggcugacagcc

SEQ ID NO: 32521 - RNA, 20 nt, Artificial Sequence
  spacer sequence CTCN PAM
gcuuuggaaggguuucccgg

SEQ ID NO: 32522 - RNA, 20 nt, Artificial Sequence
  spacer sequence CTCN PAM
ggcugcgggaagcgagacug

SEQ ID NO: 32523 - RNA, 20 nt, Artificial Sequence
  spacer sequence CTCN PAM
cuucccgcagccggagcccg

SEQ ID NO: 32524 - RNA, 20 nt, Artificial Sequence
  spacer sequence CTCN PAM
gucucgcuucccgcagccgg

SEQ ID NO: 32525 - RNA, 20 nt, Artificial Sequence
  spacer sequence CTCN PAM
gccguaggugggcagccugc

SEQ ID NO: 32526 - RNA, 20 nt, Artificial Sequence
  spacer sequence CTCN PAM
acggcauccugcagcugcag

SEQ ID NO: 32527 - RNA, 20 nt, Artificial Sequence
  spacer sequence CTCN PAM
gcagcugcaggaugccguag

SEQ ID NO: 32528 - RNA, 20 nt, Artificial Sequence
  spacer sequence CTCN PAM
cgcuugaucuuccucugcag

SEQ ID NO: 32529 - RNA, 20 nt, Artificial Sequence
  spacer sequence CTCN PAM
gcucccgcuugaucuuccuc

SEQ ID NO: 32530 - RNA, 20 nt, Artificial Sequence
  spacer sequence CTCN PAM
ggcggcggcggcggcggcgc

SEQ ID NO: 32531 - RNA, 20 nt, Artificial Sequence
  spacer sequence CTCN PAM
cgggacacaagcaggcuggg

SEQ ID NO: 32532 - RNA, 20 nt, Artificial Sequence
  spacer sequence CTCN PAM
ggcugccgccucccagugug

SEQ ID NO: 32533 - RNA, 20 nt, Artificial Sequence
  spacer sequence CTCN PAM
caguguggugugugggugaa

SEQ ID NO: 32534 - RNA, 20 nt, Artificial Sequence
  spacer sequence CTCN PAM
uuucacccacacaccacacu

SEQ ID NO: 32535 - RNA, 20 nt, Artificial Sequence
  spacer sequence CTCN PAM
aaccgcccccagcccaaggg

SEQ ID NO: 32536 - RNA, 20 nt, Artificial Sequence
  spacer sequence CTCN PAM
gcuccaaccgcccccagccc

SEQ ID NO: 32537 - RNA, 20 nt, Artificial Sequence
  spacer sequence CTCN PAM
gcccccggcucugcuccaac

SEQ ID NO: 32538 - RNA, 20 nt, Artificial Sequence
  spacer sequence CTCN PAM
gcgaagacccugggguggac

SEQ ID NO: 32539 - RNA, 20 nt, Artificial Sequence
  spacer sequence CTCN PAM
ggacuuugggccacgauguc

SEQ ID NO: 32540 - RNA, 20 nt, Artificial Sequence
  spacer sequence CTCN PAM
caggaaggaugggugugcgg

SEQ ID NO: 32541 - RNA, 20 nt, Artificial Sequence
  spacer sequence CTCN PAM
gucucccucuaugcccuaag

SEQ ID NO: 32542 - RNA, 20 nt, Artificial Sequence
  spacer sequence CTCN PAM
cucuaugcccuaaggcaggc

SEQ ID NO: 32543 - RNA, 20 nt, Artificial Sequence
  spacer sequence CTCN PAM
augcccuaaggcaggcugag

SEQ ID NO: 32544 - RNA, 20 nt, Artificial Sequence
  spacer sequence CTCN PAM
gccugccuuagggcauagag

SEQ ID NO: 32545 - RNA, 20 nt, Artificial Sequence
  spacer sequence CTCN PAM
gacgggcuuugcucagccug

SEQ ID NO: 32546 - RNA, 20 nt, Artificial Sequence
  spacer sequence CTCN PAM
gaaccccggggcaggcucag

SEQ ID NO: 32547 - RNA, 20 nt, Artificial Sequence
  spacer sequence CTCN PAM
ggcccauuuccaggcggugg

SEQ ID NO: 32548 - RNA, 20 nt, Artificial Sequence
  spacer sequence CTCN PAM
gcuaaccagcccaugccacc

SEQ ID NO: 32549 - RNA, 20 nt, Artificial Sequence
  spacer sequence CTCN PAM
cuggccccagcccucagcua

SEQ ID NO: 32550 - RNA, 20 nt, Artificial Sequence
  spacer sequence CTCN PAM
ccaucucccuggccccagcc

SEQ ID NO: 32551 - RNA, 20 nt, Artificial Sequence
  spacer sequence CTCN PAM
caguccugcccugcagcccu

SEQ ID NO: 32552 - RNA, 20 nt, Artificial Sequence
  spacer sequence CTCN PAM
caggcugucugaccccacuu

SEQ ID NO: 32553 - RNA, 20 nt, Artificial Sequence
  spacer sequence CTCN PAM
ccacccagggcuuucgggga

SEQ ID NO: 32554 - RNA, 20 nt, Artificial Sequence
  spacer sequence CTCN PAM
acccagggcuuucggggaac

SEQ ID NO: 32555 - RNA, 20 nt, Artificial Sequence
  spacer sequence CTCN PAM
accccaccagccccuucauc

SEQ ID NO: 32556 - RNA, 20 nt, Artificial Sequence
  spacer sequence CTCN PAM
ucagggacgugcauucauuc

SEQ ID NO: 32557 - RNA, 20 nt, Artificial Sequence
  spacer sequence CTCN PAM
cucugcaggcccacccugca

SEQ ID NO: 32558 - RNA, 20 nt, Artificial Sequence
  spacer sequence CTCN PAM
gcaggcccacccugcaugcc

SEQ ID NO: 32559 - RNA, 20 nt, Artificial Sequence
  spacer sequence CTCN PAM
cgggccccaucccagccugg

SEQ ID NO: 32560 - RNA, 20 nt, Artificial Sequence
  spacer sequence CTCN PAM
uccccacccccgccccaguc

SEQ ID NO: 32561 - RNA, 20 nt, Artificial Sequence
  spacer sequence CTCN PAM
ggcccagggcugcuguuccg

SEQ ID NO: 32562 - RNA, 20 nt, Artificial Sequence
  spacer sequence CTCN PAM
gcacucuggcccagggcugc

SEQ ID NO: 32563 - RNA, 20 nt, Artificial Sequence
  spacer sequence CTCN PAM
ugugcucugcacucuggccc

SEQ ID NO: 32564 - RNA, 20 nt, Artificial Sequence
  spacer sequence CTCN PAM
cagggcaaggaggucagugg

SEQ ID NO: 32565 - RNA, 20 nt, Artificial Sequence
  spacer sequence CTCN PAM
gggcaaggaggucaguggag

SEQ ID NO: 32566 - RNA, 20 nt, Artificial Sequence
  spacer sequence CTCN PAM
uugcccugagagaaggccgg

SEQ ID NO: 32567 - RNA, 20 nt, Artificial Sequence
  spacer sequence CTCN PAM
acugaccuccuugcccugag

SEQ ID NO: 32568 - RNA, 20 nt, Artificial Sequence
  spacer sequence CTCN PAM
cccccuccacugaccuccuu

SEQ ID NO: 32569 - RNA, 20 nt, Artificial Sequence
  spacer sequence CTCN PAM
cacuuugcccccugcaucca

SEQ ID NO: 32570 - RNA, 20 nt, Artificial Sequence
  spacer sequence CTCN PAM
ugagaggaaaccacaucugg

SEQ ID NO: 32571 - RNA, 20 nt, Artificial Sequence
  spacer sequence CTCN PAM
ggaggcaucgccccugcugg

SEQ ID NO: 32572 - RNA, 20 nt, Artificial Sequence
  spacer sequence CTCN PAM
caggaggcaucgccccugcu

SEQ ID NO: 32573 - RNA, 20 nt, Artificial Sequence
  spacer sequence CTCN PAM
cauuuccagaugugguuucc

SEQ ID NO: 32574 - RNA, 20 nt, Artificial Sequence
  spacer sequence CTCN PAM
uggggcgggaggaggggagc

SEQ ID NO: 32575 - RNA, 20 nt, Artificial Sequence
  spacer sequence CTCN PAM
cgccccaggaggggcguggc

SEQ ID NO: 32576 - RNA, 20 nt, Artificial Sequence
  spacer sequence CTCN PAM
ucccgccccaggaggggcgu

SEQ ID NO: 32577 - RNA, 20 nt, Artificial Sequence
  spacer sequence CTCN PAM
ccuccucccgccccaggagg

SEQ ID NO: 32578 - RNA, 20 nt, Artificial Sequence
  spacer sequence CTCN PAM
gggugugcuggggcgggcag

SEQ ID NO: 32579 - RNA, 20 nt, Artificial Sequence
  spacer sequence CTCN PAM
gcccgccccagcacacccug

SEQ ID NO: 32580 - RNA, 20 nt, Artificial Sequence
  spacer sequence CTCN PAM
ggggguggcagcaccacggc

SEQ ID NO: 32581 - RNA, 20 nt, Artificial Sequence
  spacer sequence CTCN PAM
gaugaaagccaccugacccu

SEQ ID NO: 32582 - RNA, 20 nt, Artificial Sequence
  spacer sequence CTCN PAM
agcugaugcccgaugucccu

SEQ ID NO: 32583 - RNA, 20 nt, Artificial Sequence
  spacer sequence CTCN PAM
gaaaccuggaggggagucac

SEQ ID NO: 32584 - RNA, 20 nt, Artificial Sequence
  spacer sequence CTCN PAM
agguuucugagcggccccag

SEQ ID NO: 32585 - RNA, 20 nt, Artificial Sequence
  spacer sequence CTCN PAM
ccuccagguuucugagcggc

SEQ ID NO: 32586 - RNA, 20 nt, Artificial Sequence
  spacer sequence CTCN PAM
cgcccaucccauggacacag

SEQ ID NO: 32587 - RNA, 20 nt, Artificial Sequence
  spacer sequence CTCN PAM
ccucccgcccaucccaugga

SEQ ID NO: 32588 - RNA, 20 nt, Artificial Sequence
  spacer sequence CTCN PAM
cucaccucccgcccauccca

SEQ ID NO: 32589 - RNA, 20 nt, Artificial Sequence
  spacer sequence CTCN PAM
cugccgacuggccaagccca

SEQ ID NO: 32590 - RNA, 20 nt, Artificial Sequence
  spacer sequence CTCN PAM
gggacccugcagugggcagc

SEQ ID NO: 32591 - RNA, 20 nt, Artificial Sequence
  spacer sequence CTCN PAM
cagagaagcugggaaagcug

SEQ ID NO: 32592 - RNA, 20 nt, Artificial Sequence
  spacer sequence CTCN PAM
gugagggucacugcugccca

SEQ ID NO: 32593 - RNA, 20 nt, Artificial Sequence
  spacer sequence CTCN PAM
cagagaagccgggaaagcuu

SEQ ID NO: 32594 - RNA, 20 nt, Artificial Sequence
  spacer sequence CTCN PAM
gugaggggucccaccagccc

SEQ ID NO: 32595 - RNA, 20 nt, Artificial Sequence
  spacer sequence CTCN PAM
cggccaggaaggcacggagg

SEQ ID NO: 32596 - RNA, 20 nt, Artificial Sequence
  spacer sequence CTCN PAM
gugccuuccuggccgggagu

SEQ ID NO: 32597 - RNA, 20 nt, Artificial Sequence
  spacer sequence CTCN PAM
uccgugccuuccuggccggg

SEQ ID NO: 32598 - RNA, 20 nt, Artificial Sequence
  spacer sequence CTCN PAM
gccuuuggucaccaggggcg

SEQ ID NO: 32599 - RNA, 20 nt, Artificial Sequence
  spacer sequence CTCN PAM
aaugcagccccuccuuugcu

SEQ ID NO: 32600 - RNA, 20 nt, Artificial Sequence
  spacer sequence CTCN PAM
ccagcuccaaugcagccccu

SEQ ID NO: 32601 - RNA, 20 nt, Artificial Sequence
  spacer sequence CTCN PAM
ccccucaccaucaaagugac

SEQ ID NO: 32602 - RNA, 20 nt, Artificial Sequence
  spacer sequence CTCN PAM
ccaucaaagugaccgucagg

SEQ ID NO: 32603 - RNA, 20 nt, Artificial Sequence
  spacer sequence CTCN PAM
cacaggccuuucaaggggau

SEQ ID NO: 32604 - RNA, 20 nt, Artificial Sequence
  spacer sequence CTCN PAM
gcaaggucauccccuugaaa

SEQ ID NO: 32605 - RNA, 20 nt, Artificial Sequence
  spacer sequence CTCN PAM
uuuucuuuuccccucugcaa

SEQ ID NO: 32606 - RNA, 20 nt, Artificial Sequence
  spacer sequence CTCN PAM
cuuuuucuuuuccccucugc

SEQ ID NO: 32607 - RNA, 20 nt, Artificial Sequence
  spacer sequence CTCN PAM
acccuguccucucuuuuucu

SEQ ID NO: 32608 - RNA, 20 nt, Artificial Sequence
  spacer sequence CTCN PAM
cuacccuguccucucuuuuu

SEQ ID NO: 32609 - RNA, 20 nt, Artificial Sequence
  spacer sequence CTCN PAM
ccaccugcagaaagggagcg

SEQ ID NO: 32610 - RNA, 20 nt, Artificial Sequence
  spacer sequence CTCN PAM
cuuucugcagguggggagau

SEQ ID NO: 32611 - RNA, 20 nt, Artificial Sequence
  spacer sequence CTCN PAM
cgagagagaagaccaccucc

SEQ ID NO: 32612 - RNA, 20 nt, Artificial Sequence
  spacer sequence CTCN PAM
ggagucccccuggccgcucc

SEQ ID NO: 32613 - RNA, 20 nt, Artificial Sequence
  spacer sequence CTCN PAM
cgggagucccccuggccgcu

SEQ ID NO: 32614 - RNA, 20 nt, Artificial Sequence
  spacer sequence CTCN PAM
cucgggagucccccuggccg

SEQ ID NO: 32615 - RNA, 20 nt, Artificial Sequence
  spacer sequence CTCN PAM
uccaccucugacagccccag

SEQ ID NO: 32616 - RNA, 20 nt, Artificial Sequence
  spacer sequence CTCN PAM
accucugacagccccaggcc

SEQ ID NO: 32617 - RNA, 20 nt, Artificial Sequence
  spacer sequence CTCN PAM
gacagccccaggcccccaac

SEQ ID NO: 32618 - RNA, 20 nt, Artificial Sequence
  spacer sequence CTCN PAM
ccccaaggaguggggguccu

SEQ ID NO: 32619 - RNA, 20 nt, Artificial Sequence
  spacer sequence CTCN PAM
uuggggugagggcacugcuu

SEQ ID NO: 32620 - RNA, 20 nt, Artificial Sequence
  spacer sequence CTCN PAM
aggacccccacuccuugggg

SEQ ID NO: 32621 - RNA, 20 nt, Artificial Sequence
  spacer sequence CTCN PAM
gcccgcaggcccuccaggac

SEQ ID NO: 32622 - RNA, 20 nt, Artificial Sequence
  spacer sequence CTCN PAM
gggacugggccccacggcag

SEQ ID NO: 32623 - RNA, 20 nt, Artificial Sequence
  spacer sequence CTCN PAM
augauccaaugcucaucaau

SEQ ID NO: 32624 - RNA, 20 nt, Artificial Sequence
  spacer sequence CTCN PAM
ucaaugggcgccuccugcac

SEQ ID NO: 32625 - RNA, 20 nt, Artificial Sequence
  spacer sequence CTCN PAM
ugcaccuuugacgcugcgau

SEQ ID NO: 32626 - RNA, 20 nt, Artificial Sequence
  spacer sequence CTCN PAM
aggacccggcccccugggca

SEQ ID NO: 32627 - RNA, 20 nt, Artificial Sequence
  spacer sequence CTCN PAM
uaagcccgccccaccuagug

SEQ ID NO: 32628 - RNA, 20 nt, Artificial Sequence
  spacer sequence CTCN PAM
aggcagccuccuaagcccgc

SEQ ID NO: 32629 - RNA, 20 nt, Artificial Sequence
  spacer sequence CTCN PAM
uccaggcagccuccuaagcc

SEQ ID NO: 32630 - RNA, 20 nt, Artificial Sequence
  spacer sequence CTCN PAM
ccagcccugcccugcccugu

SEQ ID NO: 32631 - RNA, 20 nt, Artificial Sequence
  spacer sequence CTCN PAM
aggcagucuccccagcccug

SEQ ID NO: 32632 - RNA, 20 nt, Artificial Sequence
  spacer sequence CTCN PAM
uccaggcagucuccccagcc

SEQ ID NO: 32633 - RNA, 20 nt, Artificial Sequence
  spacer sequence CTCN PAM
aggcagacccccagcccagc

SEQ ID NO: 32634 - RNA, 20 nt, Artificial Sequence
  spacer sequence CTCN PAM
gcacgccccccuccaggcag

SEQ ID NO: 32635 - RNA, 20 nt, Artificial Sequence
  spacer sequence CTCN PAM
agcccugcucugcacgcccc

SEQ ID NO: 32636 - RNA, 20 nt, Artificial Sequence
  spacer sequence CTCN PAM
ccagcccugcucugcacgcc

SEQ ID NO: 32637 - RNA, 20 nt, Artificial Sequence
  spacer sequence CTCN PAM
aggcagccucuccagcccug

SEQ ID NO: 32638 - RNA, 20 nt, Artificial Sequence
  spacer sequence CTCN PAM
uccaggcagccucuccagcc

SEQ ID NO: 32639 - RNA, 20 nt, Artificial Sequence
  spacer sequence CTCN PAM
ccagcauugccccacacccc

SEQ ID NO: 32640 - RNA, 20 nt, Artificial Sequence
  spacer sequence CTCN PAM
aggcagccuccccagcauug

SEQ ID NO: 32641 - RNA, 20 nt, Artificial Sequence
  spacer sequence CTCN PAM
uccaggcagccuccccagca

SEQ ID NO: 32642 - RNA, 20 nt, Artificial Sequence
  spacer sequence CTCN PAM
agcccugccccgcacccccu

SEQ ID NO: 32643 - RNA, 20 nt, Artificial Sequence
  spacer sequence CTCN PAM
ccagcccugccccgcacccc

SEQ ID NO: 32644 - RNA, 20 nt, Artificial Sequence
  spacer sequence CTCN PAM
uggcagccucuccagcccug

SEQ ID NO: 32645 - RNA, 20 nt, Artificial Sequence
  spacer sequence CTCN PAM
uccuggcagccucuccagcc

SEQ ID NO: 32646 - RNA, 20 nt, Artificial Sequence
  spacer sequence CTCN PAM
ccagcccugcauccccuccu

SEQ ID NO: 32647 - RNA, 20 nt, Artificial Sequence
  spacer sequence CTCN PAM
uccagacagccuccccagcc

SEQ ID NO: 32648 - RNA, 20 nt, Artificial Sequence
  spacer sequence CTCN PAM
gcacccccucuuccagacag

SEQ ID NO: 32649 - RNA, 20 nt, Artificial Sequence
  spacer sequence CTCN PAM
ccagcccugcucugcacccc

SEQ ID NO: 32650 - RNA, 20 nt, Artificial Sequence
  spacer sequence CTCN PAM
aggaagccuccccagcccug

SEQ ID NO: 32651 - RNA, 20 nt, Artificial Sequence
  spacer sequence CTCN PAM
uccaggaagccuccccagcc

SEQ ID NO: 32652 - RNA, 20 nt, Artificial Sequence
  spacer sequence CTCN PAM
gcccugcccuacccugugcc

SEQ ID NO: 32653 - RNA, 20 nt, Artificial Sequence
  spacer sequence CTCN PAM
aagcagacccccagcucagc

SEQ ID NO: 32654 - RNA, 20 nt, Artificial Sequence
  spacer sequence CTCN PAM
uccaagcagacccccagcuc

SEQ ID NO: 32655 - RNA, 20 nt, Artificial Sequence
  spacer sequence CTCN PAM
cauagccuaguucagcccug

SEQ ID NO: 32656 - RNA, 20 nt, Artificial Sequence
  spacer sequence CTCN PAM
cguccuguggcaaaugugac

SEQ ID NO: 32657 - RNA, 20 nt, Artificial Sequence
  spacer sequence CTCN PAM
guccaugcuggcccagggug

SEQ ID NO: 32658 - RNA, 20 nt, Artificial Sequence
  spacer sequence CTCN PAM
ggacuacuguguuccgcccg

SEQ ID NO: 32659 - RNA, 20 nt, Artificial Sequence
  spacer sequence CTCN PAM
ggccgcuggccagggcccac

SEQ ID NO: 32660 - RNA, 20 nt, Artificial Sequence
  spacer sequence CTCN PAM
cuggccgcuggccagggccc

SEQ ID NO: 32661 - RNA, 20 nt, Artificial Sequence
  spacer sequence CTCN PAM
cucuggccgcuggccagggc

SEQ ID NO: 32662 - RNA, 20 nt, Artificial Sequence
  spacer sequence CTCN PAM
cuggcuggucauccucucuc

SEQ ID NO: 32663 - RNA, 20 nt, Artificial Sequence
  spacer sequence CTCN PAM
ccacaggccuggccccaaaa

SEQ ID NO: 32664 - RNA, 20 nt, Artificial Sequence
  spacer sequence CTCN PAM
ccuccccacaggccuggccc

SEQ ID NO: 32665 - RNA, 20 nt, Artificial Sequence
  spacer sequence CTCN PAM
cgccuccccacaggccuggc

SEQ ID NO: 32666 - RNA, 20 nt, Artificial Sequence
  spacer sequence CTCN PAM
aaguccaaggcucucgccuc

SEQ ID NO: 32667 - RNA, 20 nt, Artificial Sequence
  spacer sequence CTCN PAM
cggguuaguuacuuuucucu

SEQ ID NO: 32668 - RNA, 20 nt, Artificial Sequence
  spacer sequence CTCN PAM
gguuaguuacuuuucucucc

SEQ ID NO: 32669 - RNA, 20 nt, Artificial Sequence
  spacer sequence CTCN PAM
cccccucccucuauccgaaa

SEQ ID NO: 32670 - RNA, 20 nt, Artificial Sequence
  spacer sequence CTCN PAM
cccucccucuauccgaaagu

SEQ ID NO: 32671 - RNA, 20 nt, Artificial Sequence
  spacer sequence CTCN PAM
cucuauccgaaaguuggauu

SEQ ID NO: 32672 - RNA, 20 nt, Artificial Sequence
  spacer sequence CTCN PAM
auccgaaaguuggauuugca

SEQ ID NO: 32673 - RNA, 20 nt, Artificial Sequence
  spacer sequence CTCN PAM
ugcaaauccaacuuucggau

SEQ ID NO: 32674 - RNA, 20 nt, Artificial Sequence
  spacer sequence CTCN PAM
aguccaggucuugccuggcc

SEQ ID NO: 32675 - RNA, 20 nt, Artificial Sequence
  spacer sequence CTCN PAM
cagauagucucaaguccagg

SEQ ID NO: 32676 - RNA, 20 nt, Artificial Sequence
  spacer sequence CTCN PAM
auccugauuggcacuggaca

SEQ ID NO: 32677 - RNA, 20 nt, Artificial Sequence
  spacer sequence CTCN PAM
guguucccacccugaaaaug

SEQ ID NO: 32678 - RNA, 20 nt, Artificial Sequence
  spacer sequence CTCN PAM
cuggccccacacaggccccg

SEQ ID NO: 32679 - RNA, 20 nt, Artificial Sequence
  spacer sequence CTCN PAM
cugagcucagcuuuccgagu

SEQ ID NO: 32680 - RNA, 20 nt, Artificial Sequence
  spacer sequence CTCN PAM
gggagacagcuguccccggg

SEQ ID NO: 32681 - RNA, 20 nt, Artificial Sequence
  spacer sequence CTCN PAM
gcuuuccgagugcuauucuu

SEQ ID NO: 32682 - RNA, 20 nt, Artificial Sequence
  spacer sequence CTCN PAM
gaaagcugagcucagggaga

SEQ ID NO: 32683 - RNA, 20 nt, Artificial Sequence
  spacer sequence CTCN PAM
cccggcuaagaauagcacuc

SEQ ID NO: 32684 - RNA, 20 nt, Artificial Sequence
  spacer sequence CTCN PAM
cccaggcaggcagaagggca

SEQ ID NO: 32685 - RNA, 20 nt, Artificial Sequence
  spacer sequence CTCN PAM
caggcaggcagaagggcagc

SEQ ID NO: 32686 - RNA, 20 nt, Artificial Sequence
  spacer sequence CTCN PAM
cccuggcacgaccccuuccu

SEQ ID NO: 32687 - RNA, 20 nt, Artificial Sequence
  spacer sequence CTCN PAM
cuggcacgaccccuuccucc

SEQ ID NO: 32688 - RNA, 20 nt, Artificial Sequence
  spacer sequence CTCN PAM
cgaccucagacagggagcug

SEQ ID NO: 32689 - RNA, 20 nt, Artificial Sequence
  spacer sequence CTCN PAM
gacagggagcuggggacccg

SEQ ID NO: 32690 - RNA, 20 nt, Artificial Sequence
  spacer sequence CTCN PAM
cugucugaggucgggaggaa

SEQ ID NO: 32691 - RNA, 20 nt, Artificial Sequence
  spacer sequence CTCN PAM
cguuugagguccccaucugg

SEQ ID NO: 32692 - RNA, 20 nt, Artificial Sequence
  spacer sequence CTCN PAM
aacgugagaccugggugaaa

SEQ ID NO: 32693 - RNA, 20 nt, Artificial Sequence
  spacer sequence CTCN PAM
agauggggaccucaaacgug

SEQ ID NO: 32694 - RNA, 20 nt, Artificial Sequence
  spacer sequence CTCN PAM
ccagauggggaccucaaacg

SEQ ID NO: 32695 - RNA, 20 nt, Artificial Sequence
  spacer sequence CTCN PAM
cucccccuggagaggaaguu

SEQ ID NO: 32696 - RNA, 20 nt, Artificial Sequence
  spacer sequence CTCN PAM
cccuggagaggaaguuucug

SEQ ID NO: 32697 - RNA, 20 nt, Artificial Sequence
  spacer sequence CTCN PAM
agggggagugaggccccccg

SEQ ID NO: 32698 - RNA, 20 nt, Artificial Sequence
  spacer sequence CTCN PAM
ccagggggagugaggccccc

SEQ ID NO: 32699 - RNA, 20 nt, Artificial Sequence
  spacer sequence CTCN PAM
ccgugaacgccuccgugugc

SEQ ID NO: 32700 - RNA, 20 nt, Artificial Sequence
  spacer sequence CTCN PAM
gugugcccccaccugcagcc

SEQ ID NO: 32701 - RNA, 20 nt, Artificial Sequence
  spacer sequence CTCN PAM
ccugggaaguggggcugcag

SEQ ID NO: 32702 - RNA, 20 nt, Artificial Sequence
  spacer sequence CTCN PAM
ucgccugggaaguggggcug

SEQ ID NO: 32703 - RNA, 20 nt, Artificial Sequence
  spacer sequence CTCN PAM
gucuccucgccugggaagug

SEQ ID NO: 32704 - RNA, 20 nt, Artificial Sequence
  spacer sequence CTCN PAM
cgccggggcgccucugucuc

SEQ ID NO: 32705 - RNA, 20 nt, Artificial Sequence
  spacer sequence CTCN PAM
gcagcccacccucccgccgg

SEQ ID NO: 32706 - RNA, 20 nt, Artificial Sequence
  spacer sequence CTCN PAM
guuuccccugcgcccccggg

SEQ ID NO: 32707 - RNA, 20 nt, Artificial Sequence
  spacer sequence CTCN PAM
aaagguagcccccgcccggc

SEQ ID NO: 32708 - RNA, 20 nt, Artificial Sequence
  spacer sequence CTCN PAM
uccaaagguagcccccgccc

SEQ ID NO: 32709 - RNA, 20 nt, Artificial Sequence
  spacer sequence CTCN PAM
cagcgcuccaucaccggcuu

SEQ ID NO: 32710 - RNA, 20 nt, Artificial Sequence
  spacer sequence CTCN PAM
aucaccggcuugcccaggau

SEQ ID NO: 32711 - RNA, 20 nt, Artificial Sequence
  spacer sequence CTCN PAM
ccgggcgcgaagaugggggu

SEQ ID NO: 32712 - RNA, 20 nt, Artificial Sequence
  spacer sequence CTCN PAM
ugcugcaggcuggacggcga

SEQ ID NO: 32713 - RNA, 20 nt, Artificial Sequence
  spacer sequence CTCN PAM
aucgcgcgccgcccgggccc

SEQ ID NO: 32714 - RNA, 20 nt, Artificial Sequence
  spacer sequence CTCN PAM
cugcaggggcuugugggccg

SEQ ID NO: 32715 - RNA, 20 nt, Artificial Sequence
  spacer sequence CTCN PAM
cggguccgccccccgggccu

SEQ ID NO: 32716 - RNA, 20 nt, Artificial Sequence
  spacer sequence CTCN PAM
cgcggguccgccccccgggc

SEQ ID NO: 32717 - RNA, 20 nt, Artificial Sequence
  spacer sequence CTCN PAM
gggagcggccucuagcggcg

SEQ ID NO: 32718 - RNA, 20 nt, Artificial Sequence
  spacer sequence CTCN PAM
cggagccgcgcgcgcgcguc

SEQ ID NO: 32719 - RNA, 20 nt, Artificial Sequence
  spacer sequence CTCN PAM
agcggcggccacgcgagagg

SEQ ID NO: 32720 - RNA, 20 nt, Artificial Sequence
  spacer sequence CTCN PAM
cguggccgccgcuagaggcc

SEQ ID NO: 32721 - RNA, 20 nt, Artificial Sequence
  spacer sequence CTCN PAM
cgcguggccgccgcuagagg

SEQ ID NO: 32722 - RNA, 20 nt, Artificial Sequence
  spacer sequence CTCN PAM
cgccaccucucgcguggccg

SEQ ID NO: 32723 - RNA, 20 nt, Artificial Sequence
  spacer sequence CTCN PAM
ccaaggagccucggugcccc

SEQ ID NO: 32724 - RNA, 20 nt, Artificial Sequence
  spacer sequence CTCN PAM
uuggggagggggcggccggg

SEQ ID NO: 32725 - RNA, 20 nt, Artificial Sequence
  spacer sequence CTCN PAM
gugcccccucugcggagcgg

SEQ ID NO: 32726 - RNA, 20 nt, Artificial Sequence
  spacer sequence CTCN PAM
gcggagcgggcaccgcagcc

SEQ ID NO: 32727 - RNA, 20 nt, Artificial Sequence
  spacer sequence CTCN PAM
gcagagggggcaccgaggcu

SEQ ID NO: 32728 - RNA, 20 nt, Artificial Sequence
  spacer sequence CTCN PAM
ucugucagcaccgcagaaag

SEQ ID NO: 32729 - RNA, 20 nt, Artificial Sequence
  spacer sequence CTCN PAM
ucgcuggggugugagaaucu

SEQ ID NO: 32730 - RNA, 20 nt, Artificial Sequence
  spacer sequence CTCN PAM
cuggggugugagaaucugag

SEQ ID NO: 32731 - RNA, 20 nt, Artificial Sequence
  spacer sequence CTCN PAM
caccccagcgaggagggggc

SEQ ID NO: 32732 - RNA, 20 nt, Artificial Sequence
  spacer sequence CTCN PAM
gauucucacaccccagcgag

SEQ ID NO: 32733 - RNA, 20 nt, Artificial Sequence
  spacer sequence CTCN PAM
cuguagcaucuucugaagau

SEQ ID NO: 32734 - RNA, 20 nt, Artificial Sequence
  spacer sequence CTCN PAM
auuaaaaaaagacagaacuc

SEQ ID NO: 32735 - RNA, 20 nt, Artificial Sequence
  spacer sequence CTCN PAM
aacuccugggcgcaagcgau

SEQ ID NO: 32736 - RNA, 20 nt, Artificial Sequence
  spacer sequence CTCN PAM
ugggcgcaagcgauccuccc

SEQ ID NO: 32737 - RNA, 20 nt, Artificial Sequence
  spacer sequence CTCN PAM
cgcuucagccucccaaagug

SEQ ID NO: 32738 - RNA, 20 nt, Artificial Sequence
  spacer sequence CTCN PAM
caaaguguugggauuacagg

SEQ ID NO: 32739 - RNA, 20 nt, Artificial Sequence
  spacer sequence CTCN PAM
cgccuguaaucccaacacuu

SEQ ID NO: 32740 - RNA, 20 nt, Artificial Sequence
  spacer sequence CTCN PAM
auagagcagccgacugucau

SEQ ID NO: 32741 - RNA, 20 nt, Artificial Sequence
  spacer sequence CTCN PAM
auggaguagccauucauuuu

SEQ ID NO: 32742 - RNA, 20 nt, Artificial Sequence
  spacer sequence CTCN PAM
guuuccacaucuguaaaaug

SEQ ID NO: 32743 - RNA, 20 nt, Artificial Sequence
  spacer sequence CTCN PAM
aagccucaguuuccacaucu

SEQ ID NO: 32744 - RNA, 20 nt, Artificial Sequence
  spacer sequence CTCN PAM
uggccaccagaccaccggcu

SEQ ID NO: 32745 - RNA, 20 nt, Artificial Sequence
  spacer sequence CTCN PAM
aaugcuggguccccacccuc

SEQ ID NO: 32746 - RNA, 20 nt, Artificial Sequence
  spacer sequence CTCN PAM
gaugccccccuuucaugagc

SEQ ID NO: 32747 - RNA, 20 nt, Artificial Sequence
  spacer sequence CTCN PAM
ugaaaggggggcaucagagc

SEQ ID NO: 32748 - RNA, 20 nt, Artificial Sequence
  spacer sequence CTCN PAM
gaugacccccagccuauggg

SEQ ID NO: 32749 - RNA, 20 nt, Artificial Sequence
  spacer sequence CTCN PAM
aguucuggagaccaggacuc

SEQ ID NO: 32750 - RNA, 20 nt, Artificial Sequence
  spacer sequence CTCN PAM
agaacuggaggcgucuuugg

SEQ ID NO: 32751 - RNA, 20 nt, Artificial Sequence
  spacer sequence CTCN PAM
aucccagcagugcccuuucc

SEQ ID NO: 32752 - RNA, 20 nt, Artificial Sequence
  spacer sequence CTCN PAM
ggcggcccugcagcuggggu

SEQ ID NO: 32753 - RNA, 20 nt, Artificial Sequence
  spacer sequence CTCN PAM
cccagcccaggguagccccu

SEQ ID NO: 32754 - RNA, 20 nt, Artificial Sequence
  spacer sequence CTCN PAM
gauagccgguuuccuucccc

SEQ ID NO: 32755 - RNA, 20 nt, Artificial Sequence
  spacer sequence CTCN PAM
gaacguggggccacagucau

SEQ ID NO: 32756 - RNA, 20 nt, Artificial Sequence
  spacer sequence CTCN PAM
ugacuguggccccacguuca

SEQ ID NO: 32757 - RNA, 20 nt, Artificial Sequence
  spacer sequence CTCN PAM
gggcucaugacuguggcccc

SEQ ID NO: 32758 - RNA, 20 nt, Artificial Sequence
  spacer sequence CTCN PAM
uguuaaaugggcauaauaac

SEQ ID NO: 32759 - RNA, 20 nt, Artificial Sequence
  spacer sequence CTCN PAM
guuucccucguguuaaaugg

SEQ ID NO: 32760 - RNA, 20 nt, Artificial Sequence
  spacer sequence CTCN PAM
gggccucaguuucccucgug

SEQ ID NO: 32761 - RNA, 20 nt, Artificial Sequence
  spacer sequence CTCN PAM
cugggccucaguuucccucg

SEQ ID NO: 32762 - RNA, 20 nt, Artificial Sequence
  spacer sequence CTCN PAM
accucucugggccucaguuu

SEQ ID NO: 32763 - RNA, 20 nt, Artificial Sequence
  spacer sequence CTCN PAM
gaaacagcucccgcgcgcgg

SEQ ID NO: 32764 - RNA, 20 nt, Artificial Sequence
  spacer sequence CTCN PAM
cgcgcgcggccuucccugcg

SEQ ID NO: 32765 - RNA, 20 nt, Artificial Sequence
  spacer sequence CTCN PAM
acgccuccacaugccccugc

SEQ ID NO: 32766 - RNA, 20 nt, Artificial Sequence
  spacer sequence CTCN PAM
acaugccccugccaccucuu

SEQ ID NO: 32767 - RNA, 20 nt, Artificial Sequence
  spacer sequence CTCN PAM
ugcacagcuccuuagccccg

SEQ ID NO: 32768 - RNA, 20 nt, Artificial Sequence
  spacer sequence CTCN PAM
uuagccccgggccuuggcac

SEQ ID NO: 32769 - RNA, 20 nt, Artificial Sequence
  spacer sequence CTCN PAM
uccccuugcccagacagccu

SEQ ID NO: 32770 - RNA, 20 nt, Artificial Sequence
  spacer sequence CTCN PAM
cuccuggucaggccgcuuuc

SEQ ID NO: 32771 - RNA, 20 nt, Artificial Sequence
  spacer sequence CTCN PAM
ccuggucaggccgcuuucuc

SEQ ID NO: 32772 - RNA, 20 nt, Artificial Sequence
  spacer sequence CTCN PAM
uggucaggccgcuuucucgu

SEQ ID NO: 32773 - RNA, 20 nt, Artificial Sequence
  spacer sequence CTCN PAM
uucugucucaagcugagccc

SEQ ID NO: 32774 - RNA, 20 nt, Artificial Sequence
  spacer sequence CTCN PAM
agcugagcccacguguccuc

SEQ ID NO: 32775 - RNA, 20 nt, Artificial Sequence
  spacer sequence CTCN PAM
gcuugagacagaacgagaaa

SEQ ID NO: 32776 - RNA, 20 nt, Artificial Sequence
  spacer sequence CTCN PAM
aggagacacccccauucugc

SEQ ID NO: 32777 - RNA, 20 nt, Artificial Sequence
  spacer sequence CTCN PAM
uagaggacacgugggcucag

SEQ ID NO: 32778 - RNA, 20 nt, Artificial Sequence
  spacer sequence CTCN PAM
gaaaaacaaaaacaaacaaa

SEQ ID NO: 32779 - RNA, 20 nt, Artificial Sequence
  spacer sequence CTCN PAM
gucucagaaaaacaaaaaca

SEQ ID NO: 32780 - RNA, 20 nt, Artificial Sequence
  spacer sequence CTCN PAM
cucuguugcucagguuggag

SEQ ID NO: 32781 - RNA, 20 nt, Artificial Sequence
  spacer sequence CTCN PAM
guugcucagguuggagugca

SEQ ID NO: 32782 - RNA, 20 nt, Artificial Sequence
  spacer sequence CTCN PAM
gguuggagugcaguggcaug

SEQ ID NO: 32783 - RNA, 20 nt, Artificial Sequence
  spacer sequence CTCN PAM
aaccugagcaacagagugag

SEQ ID NO: 32784 - RNA, 20 nt, Artificial Sequence
  spacer sequence CTCN PAM
gugcaaccucugccucccgg

SEQ ID NO: 32785 - RNA, 20 nt, Artificial Sequence
  spacer sequence CTCN PAM
gccucccggguucaagcgau

SEQ ID NO: 32786 - RNA, 20 nt, Artificial Sequence
  spacer sequence CTCN PAM
cggguucaagcgauucuccu

SEQ ID NO: 32787 - RNA, 20 nt, Artificial Sequence
  spacer sequence CTCN PAM
uaccucagccuccuggguag

SEQ ID NO: 32788 - RNA, 20 nt, Artificial Sequence
  spacer sequence CTCN PAM
gccuccuggguagcugugau

SEQ ID NO: 32789 - RNA, 20 nt, Artificial Sequence
  spacer sequence CTCN PAM
uggguagcugugaugacagg

SEQ ID NO: 32790 - RNA, 20 nt, Artificial Sequence
  spacer sequence CTCN PAM
ugaccucgugauucacccgc

SEQ ID NO: 32791 - RNA, 20 nt, Artificial Sequence
  spacer sequence CTCN PAM
ugauucacccgccucggccu

SEQ ID NO: 32792 - RNA, 20 nt, Artificial Sequence
  spacer sequence CTCN PAM
gccuccuaaagugcugggau

SEQ ID NO: 32793 - RNA, 20 nt, Artificial Sequence
  spacer sequence CTCN PAM
uaaagugcugggauugcaag

SEQ ID NO: 32794 - RNA, 20 nt, Artificial Sequence
  spacer sequence CTCN PAM
caccuugcaaucccagcacu

SEQ ID NO: 32795 - RNA, 20 nt, Artificial Sequence
  spacer sequence CTCN PAM
cucuuugguaguucacuaac

SEQ ID NO: 32796 - RNA, 20 nt, Artificial Sequence
  spacer sequence CTCN PAM
cuuugguaguucacuaacgg

SEQ ID NO: 32797 - RNA, 20 nt, Artificial Sequence
  spacer sequence CTCN PAM
uugguaguucacuaacggaa

SEQ ID NO: 32798 - RNA, 20 nt, Artificial Sequence
  spacer sequence CTCN PAM
cacagggcugucagugaucc

SEQ ID NO: 32799 - RNA, 20 nt, Artificial Sequence
  spacer sequence CTCN PAM
cagggcugucagugauccug

SEQ ID NO: 32800 - RNA, 20 nt, Artificial Sequence
  spacer sequence CTCN PAM
caccugugaucccagugccu

SEQ ID NO: 32801 - RNA, 20 nt, Artificial Sequence
  spacer sequence CTCN PAM
cccaggcacugggaucacag

SEQ ID NO: 32802 - RNA, 20 nt, Artificial Sequence
  spacer sequence CTCN PAM
ggccugugaucccaccacuu

SEQ ID NO: 32803 - RNA, 20 nt, Artificial Sequence
  spacer sequence CTCN PAM
gcaucccaaaguggugggau

SEQ ID NO: 32804 - RNA, 20 nt, Artificial Sequence
  spacer sequence CTCN PAM
gcaugguggcaggcgccugu

SEQ ID NO: 32805 - RNA, 20 nt, Artificial Sequence
  spacer sequence CTCN PAM
acuaaaaguacaaaaaauua

SEQ ID NO: 32806 - RNA, 20 nt, Artificial Sequence
  spacer sequence CTCN PAM
aucuccugaccucgugaucc

SEQ ID NO: 32807 - RNA, 20 nt, Artificial Sequence
  spacer sequence CTCN PAM
ugaccucgugauccgcccac

SEQ ID NO: 32808 - RNA, 20 nt, Artificial Sequence
  spacer sequence CTCN PAM
ugauccgcccaccuuggccu

SEQ ID NO: 32809 - RNA, 20 nt, Artificial Sequence
  spacer sequence CTCN PAM
caaacugcugggauuccagg

SEQ ID NO: 32810 - RNA, 20 nt, Artificial Sequence
  spacer sequence CTCN PAM
uggaaucccagcaguuuggg

SEQ ID NO: 32811 - RNA, 20 nt, Artificial Sequence
  spacer sequence CTCN PAM
cuccuggaaucccagcaguu

SEQ ID NO: 32812 - RNA, 20 nt, Artificial Sequence
  spacer sequence CTCN PAM
gcccuuuuuuuucuaagagg

SEQ ID NO: 32813 - RNA, 20 nt, Artificial Sequence
  spacer sequence CTCN PAM
uagaaaaaaaagggccgagc

SEQ ID NO: 32814 - RNA, 20 nt, Artificial Sequence
  spacer sequence CTCN PAM
cucuuagaaaaaaaagggcc

SEQ ID NO: 32815 - RNA, 20 nt, Artificial Sequence
  spacer sequence CTCN PAM
guugcccagguuggugugca

SEQ ID NO: 32816 - RNA, 20 nt, Artificial Sequence
  spacer sequence CTCN PAM
gcucacugcaaccucuacuu

SEQ ID NO: 32817 - RNA, 20 nt, Artificial Sequence
  spacer sequence CTCN PAM
cugcaaccucuacuuccugc

SEQ ID NO: 32818 - RNA, 20 nt, Artificial Sequence
  spacer sequence CTCN PAM
acuuccugccuucaagcauu

SEQ ID NO: 32819 - RNA, 20 nt, Artificial Sequence
  spacer sequence CTCN PAM
ggccuuagcuucccgaguag

SEQ ID NO: 32820 - RNA, 20 nt, Artificial Sequence
  spacer sequence CTCN PAM
ggaagcuaaggccggagaaa

SEQ ID NO: 32821 - RNA, 20 nt, Artificial Sequence
  spacer sequence CTCN PAM
acuaaaaauacaaaagaaaa

SEQ ID NO: 32822 - RNA, 20 nt, Artificial Sequence
  spacer sequence CTCN PAM
aucuccugaccuaaauugau

SEQ ID NO: 32823 - RNA, 20 nt, Artificial Sequence
  spacer sequence CTCN PAM
ugaccuaaauugauccucgg

SEQ ID NO: 32824 - RNA, 20 nt, Artificial Sequence
  spacer sequence CTCN PAM
gccucccaaaguguugggau

SEQ ID NO: 32825 - RNA, 20 nt, Artificial Sequence
  spacer sequence CTCN PAM
caaaguguugggauuauagg

SEQ ID NO: 32826 - RNA, 20 nt, Artificial Sequence
  spacer sequence CTCN PAM
cccggccuuguuccuuguau

SEQ ID NO: 32827 - RNA, 20 nt, Artificial Sequence
  spacer sequence CTCN PAM
cagcacauugacagccugau

SEQ ID NO: 32828 - RNA, 20 nt, Artificial Sequence
  spacer sequence CTCN PAM
uuaaucucacagcacauuga

SEQ ID NO: 32829 - RNA, 20 nt, Artificial Sequence
  spacer sequence CTCN PAM
uucugcugacauuggaggac

SEQ ID NO: 32830 - RNA, 20 nt, Artificial Sequence
  spacer sequence CTCN PAM
aaugucagcagaaggaggug

SEQ ID NO: 32831 - RNA, 20 nt, Artificial Sequence
  spacer sequence CTCN PAM
gcacccugcagugcacacga

SEQ ID NO: 32832 - RNA, 20 nt, Artificial Sequence
  spacer sequence CTCN PAM
augccagcagcaccccgcac

SEQ ID NO: 32833 - RNA, 20 nt, Artificial Sequence
  spacer sequence CTCN PAM
aguugugacaaccaaaaccg

SEQ ID NO: 32834 - RNA, 20 nt, Artificial Sequence
  spacer sequence CTCN PAM
gccucucggacccucgggau

SEQ ID NO: 32835 - RNA, 20 nt, Artificial Sequence
  spacer sequence CTCN PAM
cggacccucgggauccucuu

SEQ ID NO: 32836 - RNA, 20 nt, Artificial Sequence
  spacer sequence CTCN PAM
gacccucgggauccucuucu

SEQ ID NO: 32837 - RNA, 20 nt, Artificial Sequence
  spacer sequence CTCN PAM
ggauccucuucugugaaaug

SEQ ID NO: 32838 - RNA, 20 nt, Artificial Sequence
  spacer sequence CTCN PAM
ucugugaaaugcggacaggg

SEQ ID NO: 32839 - RNA, 20 nt, Artificial Sequence
  spacer sequence CTCN PAM
uuccccuguccgcauuucac

SEQ ID NO: 32840 - RNA, 20 nt, Artificial Sequence
  spacer sequence CTCN PAM
cgcgggacgcucacgugccg

SEQ ID NO: 32841 - RNA, 20 nt, Artificial Sequence
  spacer sequence CTCN PAM
cgugccguucccgcuccguc

SEQ ID NO: 32842 - RNA, 20 nt, Artificial Sequence
  spacer sequence CTCN PAM
guccgcccgccuggggugcg

SEQ ID NO: 32843 - RNA, 20 nt, Artificial Sequence
  spacer sequence CTCN PAM
cacuccccgcagcgccccac

SEQ ID NO: 32844 - RNA, 20 nt, Artificial Sequence
  spacer sequence CTCN PAM
ccgcagcgccccacgcggcu

SEQ ID NO: 32845 - RNA, 20 nt, Artificial Sequence
  spacer sequence CTCN PAM
accgcuuccgagugaagagu

SEQ ID NO: 32846 - RNA, 20 nt, Artificial Sequence
  spacer sequence CTCN PAM
gaagcgguggagccgcgugg

SEQ ID NO: 32847 - RNA, 20 nt, Artificial Sequence
  spacer sequence CTCN PAM
ucacucggaagcgguggagc

SEQ ID NO: 32848 - RNA, 20 nt, Artificial Sequence
  spacer sequence CTCN PAM
uuaacucuucacucggaagc

SEQ ID NO: 32849 - RNA, 20 nt, Artificial Sequence
  spacer sequence CTCN PAM
gggcuaggcacugugggcgc

SEQ ID NO: 32850 - RNA, 20 nt, Artificial Sequence
  spacer sequence CTCN PAM
caagcgcgcacgcgcacgca

SEQ ID NO: 32851 - RNA, 20 nt, Artificial Sequence
  spacer sequence CTCN PAM
gcccgcgcgcauccuccccu

SEQ ID NO: 32852 - RNA, 20 nt, Artificial Sequence
  spacer sequence CTCN PAM
ccuugcaggggcggggccag

SEQ ID NO: 32853 - RNA, 20 nt, Artificial Sequence
  spacer sequence CTCN PAM
auuucccagcgugccccgcg

SEQ ID NO: 32854 - RNA, 20 nt, Artificial Sequence
  spacer sequence CTCN PAM
uggcguugccgcggggcacg

SEQ ID NO: 32855 - RNA, 20 nt, Artificial Sequence
  spacer sequence CTCN PAM
gaggagaaaggaaaacgcgc

SEQ ID NO: 32856 - RNA, 20 nt, Artificial Sequence
  spacer sequence CTCN PAM
gaggcuccuggcguugccgc

SEQ ID NO: 32857 - RNA, 20 nt, Artificial Sequence
  spacer sequence CTCN PAM
ucggaggcuccuggcguugc

SEQ ID NO: 32858 - RNA, 20 nt, Artificial Sequence
  spacer sequence CTCN PAM
gggacgcacgcacagacgga

SEQ ID NO: 32859 - RNA, 20 nt, Artificial Sequence
  spacer sequence CTCN PAM
gucugugcgugcgucccuga

SEQ ID NO: 32860 - RNA, 20 nt, Artificial Sequence
  spacer sequence CTCN PAM
gggggcggguccagggguac

SEQ ID NO: 32861 - RNA, 20 nt, Artificial Sequence
  spacer sequence CTCN PAM
cgcacggggucuccgggggc

SEQ ID NO: 32862 - RNA, 20 nt, Artificial Sequence
  spacer sequence CTCN PAM
gcgccaacggucaccgcgcg

SEQ ID NO: 32863 - RNA, 20 nt, Artificial Sequence
  spacer sequence CTCN PAM
ccucggcgccaacggucacc

SEQ ID NO: 32864 - RNA, 20 nt, Artificial Sequence
  spacer sequence CTCN PAM
uccccucggcgccaacgguc

SEQ ID NO: 32865 - RNA, 20 nt, Artificial Sequence
  spacer sequence CTCN PAM
ccacagccgcggcccggauc

SEQ ID NO: 32866 - RNA, 20 nt, Artificial Sequence
  spacer sequence CTCN PAM
gucgcccuccccacagccgc

SEQ ID NO: 32867 - RNA, 20 nt, Artificial Sequence
  spacer sequence CTCN PAM
ggaaggucacccgcuccguc

SEQ ID NO: 32868 - RNA, 20 nt, Artificial Sequence
  spacer sequence CTCN PAM
cgccuccggaaggucacccg

SEQ ID NO: 32869 - RNA, 20 nt, Artificial Sequence
  spacer sequence CTCN PAM
cucccgccuccggaagguca

SEQ ID NO: 32870 - RNA, 20 nt, Artificial Sequence
  spacer sequence CTCN PAM
cucgcucccgccuccggaag

SEQ ID NO: 32871 - RNA, 20 nt, Artificial Sequence
  spacer sequence CTCN PAM
ucgcucgcucccgccuccgg

SEQ ID NO: 32872 - RNA, 20 nt, Artificial Sequence
  spacer sequence CTCN PAM
cgggccuccucgcucgcucc

SEQ ID NO: 32873 - RNA, 20 nt, Artificial Sequence
  spacer sequence CTCN PAM
gcgcucccgggccuccucgc

SEQ ID NO: 32874 - RNA, 20 nt, Artificial Sequence
  spacer sequence CTCN PAM
ggcgccgacgagaucgggug

SEQ ID NO: 32875 - RNA, 20 nt, Artificial Sequence
  spacer sequence CTCN PAM
ucggcgcccgaguuguucau

SEQ ID NO: 32876 - RNA, 20 nt, Artificial Sequence
  spacer sequence CTCN PAM
cccgaucucgucggcgcccg

SEQ ID NO: 32877 - RNA, 20 nt, Artificial Sequence
  spacer sequence CTCN PAM
uccucacccgaucucgucgg

SEQ ID NO: 32878 - RNA, 20 nt, Artificial Sequence
  spacer sequence CTCN PAM
gccccgagcccggcccgccg

SEQ ID NO: 32879 - RNA, 20 nt, Artificial Sequence
  spacer sequence CTCN PAM
gggcggagacgcaggcccgc

SEQ ID NO: 32880 - RNA, 20 nt, Artificial Sequence
  spacer sequence CTCN PAM
ccgccgcccggccucagacg

SEQ ID NO: 32881 - RNA, 20 nt, Artificial Sequence
  spacer sequence CTCN PAM
gacgccgccccccggggccg

SEQ ID NO: 32882 - RNA, 20 nt, Artificial Sequence
  spacer sequence CTCN PAM
ggacccggacucgccgcggc

SEQ ID NO: 32883 - RNA, 20 nt, Artificial Sequence
  spacer sequence CTCN PAM
ccgcggcuucgcgccggggg

SEQ ID NO: 32884 - RNA, 20 nt, Artificial Sequence
  spacer sequence CTCN PAM
uucaggaucccccaggacgg

SEQ ID NO: 32885 - RNA, 20 nt, Artificial Sequence
  spacer sequence CTCN PAM
ccuucaggaucccccaggac

SEQ ID NO: 32886 - RNA, 20 nt, Artificial Sequence
  spacer sequence CTCN PAM
ggcucuccuucaggaucccc

SEQ ID NO: 32887 - RNA, 20 nt, Artificial Sequence
  spacer sequence CTCN PAM
agacuuccuggucgggggaa

SEQ ID NO: 32888 - RNA, 20 nt, Artificial Sequence
  spacer sequence CTCN PAM
ggacgcgcagucgggaagcg

SEQ ID NO: 32889 - RNA, 20 nt, Artificial Sequence
  spacer sequence CTCN PAM
cauucggggucccucaggac

SEQ ID NO: 32890 - RNA, 20 nt, Artificial Sequence
  spacer sequence CTCN PAM
ggcucccauucggggucccu

SEQ ID NO: 32891 - RNA, 20 nt, Artificial Sequence
  spacer sequence CTCN PAM
agacccccccaaguucccgu

SEQ ID NO: 32892 - RNA, 20 nt, Artificial Sequence
  spacer sequence CTCN PAM
uucggggucccccaggccag

SEQ ID NO: 32893 - RNA, 20 nt, Artificial Sequence
  spacer sequence CTCN PAM
gguucucauucggggucccc

SEQ ID NO: 32894 - RNA, 20 nt, Artificial Sequence
  spacer sequence CTCN PAM
cucagguucucauucggggu

SEQ ID NO: 32895 - RNA, 20 nt, Artificial Sequence
  spacer sequence CTCN PAM
ccgcagacucccucagguuc

SEQ ID NO: 32896 - RNA, 20 nt, Artificial Sequence
  spacer sequence CTCN PAM
cggcuuccuggccaggggga

SEQ ID NO: 32897 - RNA, 20 nt, Artificial Sequence
  spacer sequence CTCN PAM
ccacgugcgccgcccgccaa

SEQ ID NO: 32898 - RNA, 20 nt, Artificial Sequence
  spacer sequence CTCN PAM
gcucgccacgugcgccgccc

SEQ ID NO: 32899 - RNA, 20 nt, Artificial Sequence
  spacer sequence CTCN PAM
ccucggcucgccacgugcgc

SEQ ID NO: 32900 - RNA, 20 nt, Artificial Sequence
  spacer sequence CTCN PAM
gggcuccgggcuccccgcuc

SEQ ID NO: 32901 - RNA, 20 nt, Artificial Sequence
  spacer sequence CTCN PAM
gggcuccccgcucccauccc

SEQ ID NO: 32902 - RNA, 20 nt, Artificial Sequence
  spacer sequence CTCN PAM
ccgcucccaucccacccccc

SEQ ID NO: 32903 - RNA, 20 nt, Artificial Sequence
  spacer sequence CTCN PAM
caucccacccccccaaagug

SEQ ID NO: 32904 - RNA, 20 nt, Artificial Sequence
  spacer sequence CTCN PAM
cgaccuuaccacuuuggggg

SEQ ID NO: 32905 - RNA, 20 nt, Artificial Sequence
  spacer sequence CTCN PAM
ggucagccggggccugcugu

SEQ ID NO: 32906 - RNA, 20 nt, Artificial Sequence
  spacer sequence CTCN PAM
gcgccuccccgccgggggug

SEQ ID NO: 32907 - RNA, 20 nt, Artificial Sequence
  spacer sequence CTCN PAM
ccgccgggggugggcuugag

SEQ ID NO: 32908 - RNA, 20 nt, Artificial Sequence
  spacer sequence CTCN PAM
agcccacccccggcggggag

SEQ ID NO: 32909 - RNA, 20 nt, Artificial Sequence
  spacer sequence CTCN PAM
cuuccgcagcucaagcccac

SEQ ID NO: 32910 - RNA, 20 nt, Artificial Sequence
  spacer sequence CTCN PAM
cccuuccgcagcucaagccc

SEQ ID NO: 32911 - RNA, 20 nt, Artificial Sequence
  spacer sequence CTCN PAM
gaagcgcugacucucccuuc

SEQ ID NO: 32912 - RNA, 20 nt, Artificial Sequence
  spacer sequence CTCN PAM
gcgcagcaaagauccgcggg

SEQ ID NO: 32913 - RNA, 20 nt, Artificial Sequence
  spacer sequence CTCN PAM
uauaggagccugaccugcuc

SEQ ID NO: 32914 - RNA, 20 nt, Artificial Sequence
  spacer sequence CTCN PAM
uauaggaggggacgccucgg

SEQ ID NO: 32915 - RNA, 20 nt, Artificial Sequence
  spacer sequence CTCN PAM
ggaccccgcggggccgggaa

SEQ ID NO: 32916 - RNA, 20 nt, Artificial Sequence
  spacer sequence CTCN PAM
uuucgcugugccccagggcu

SEQ ID NO: 32917 - RNA, 20 nt, Artificial Sequence
  spacer sequence CTCN PAM
gcgccauucuuugguaggag

SEQ ID NO: 32918 - RNA, 20 nt, Artificial Sequence
  spacer sequence CTCN PAM
uaccaaagaauggcgccgag

SEQ ID NO: 32919 - RNA, 20 nt, Artificial Sequence
  spacer sequence CTCN PAM
ugccgcagcgacgucguuuu

SEQ ID NO: 32920 - RNA, 20 nt, Artificial Sequence
  spacer sequence CTCN PAM
aaaacgacgucgcugcggca

SEQ ID NO: 32921 - RNA, 20 nt, Artificial Sequence
  spacer sequence CTCN PAM
gugcccuuagcuuugagcag

SEQ ID NO: 32922 - RNA, 20 nt, Artificial Sequence
  spacer sequence CTCN PAM
aagcuaagggcaccgagaaa

SEQ ID NO: 32923 - RNA, 20 nt, Artificial Sequence
  spacer sequence CTCN PAM
gcgcugggcuuggcuagugc

SEQ ID NO: 32924 - RNA, 20 nt, Artificial Sequence
  spacer sequence CTCN PAM
cgcacuagccaagcccagcg

SEQ ID NO: 32925 - RNA, 20 nt, Artificial Sequence
  spacer sequence CTCN PAM
agcagcaaccgcucccgcac

SEQ ID NO: 32926 - RNA, 20 nt, Artificial Sequence
  spacer sequence CTCN PAM
cgcaccagcuacaggucaca

SEQ ID NO: 32927 - RNA, 20 nt, Artificial Sequence
  spacer sequence CTCN PAM
caccagcuacaggucacacu

SEQ ID NO: 32928 - RNA, 20 nt, Artificial Sequence
  spacer sequence CTCN PAM
cccccuccccagacaaaaca

SEQ ID NO: 32929 - RNA, 20 nt, Artificial Sequence
  spacer sequence CTCN PAM
cccuccccagacaaaacaaa

SEQ ID NO: 32930 - RNA, 20 nt, Artificial Sequence
  spacer sequence CTCN PAM
ccagacaaaacaaaagagca

SEQ ID NO: 32931 - RNA, 20 nt, Artificial Sequence
  spacer sequence CTCN PAM
uuuguuuugucuggggaggg

SEQ ID NO: 32932 - RNA, 20 nt, Artificial Sequence
  spacer sequence CTCN PAM
aacggaaggugcucuuuugu

SEQ ID NO: 32933 - RNA, 20 nt, Artificial Sequence
  spacer sequence CTCN PAM
cagcacgggcuaggcagggg

SEQ ID NO: 32934 - RNA, 20 nt, Artificial Sequence
  spacer sequence CTCN PAM
ccaggcacuuugacuuggca

SEQ ID NO: 32935 - RNA, 20 nt, Artificial Sequence
  spacer sequence CTCN PAM
aggcacuuugacuuggcagg

SEQ ID NO: 32936 - RNA, 20 nt, Artificial Sequence
  spacer sequence CTCN PAM
cacaggcacacggacccugc

SEQ ID NO: 32937 - RNA, 20 nt, Artificial Sequence
  spacer sequence CTCN PAM
ggcccaucccugcaaugucc

SEQ ID NO: 32938 - RNA, 20 nt, Artificial Sequence
  spacer sequence CTCN PAM
cugcucaggcccaucccugc

SEQ ID NO: 32939 - RNA, 20 nt, Artificial Sequence
  spacer sequence CTCN PAM
aucccccauggccgguggac

SEQ ID NO: 32940 - RNA, 20 nt, Artificial Sequence
  spacer sequence CTCN PAM
ccccaaagucgauggcucca

SEQ ID NO: 32941 - RNA, 20 nt, Artificial Sequence
  spacer sequence CTCN PAM
cagaugggguaccuggauua

SEQ ID NO: 32942 - RNA, 20 nt, Artificial Sequence
  spacer sequence CTCN PAM
acccaagccguggcugugag

SEQ ID NO: 32943 - RNA, 20 nt, Artificial Sequence
  spacer sequence CTCN PAM
cagccacggcuuggguggag

SEQ ID NO: 32944 - RNA, 20 nt, Artificial Sequence
  spacer sequence CTCN PAM
ucacagccacggcuugggug

SEQ ID NO: 32945 - RNA, 20 nt, Artificial Sequence
  spacer sequence CTCN PAM
agccuccucacagccacggc

SEQ ID NO: 32946 - RNA, 20 nt, Artificial Sequence
  spacer sequence CTCN PAM
ccagccuccucacagccacg

SEQ ID NO: 32947 - RNA, 20 nt, Artificial Sequence
  spacer sequence CTCN PAM
cuccagccuccucacagcca

SEQ ID NO: 32948 - RNA, 20 nt, Artificial Sequence
  spacer sequence CTCN PAM
ccucucuccagccuccucac

SEQ ID NO: 32949 - RNA, 20 nt, Artificial Sequence
  spacer sequence CTCN PAM
uguccccucccugcauggac

SEQ ID NO: 32950 - RNA, 20 nt, Artificial Sequence
  spacer sequence CTCN PAM
cugcauggacacccuuggga

SEQ ID NO: 32951 - RNA, 20 nt, Artificial Sequence
  spacer sequence CTCN PAM
agacccaggcugggacccca

SEQ ID NO: 32952 - RNA, 20 nt, Artificial Sequence
  spacer sequence CTCN PAM
caggccacccggacgccacg

SEQ ID NO: 32953 - RNA, 20 nt, Artificial Sequence
  spacer sequence CTCN PAM
acgcagcccguggcguccgg

SEQ ID NO: 32954 - RNA, 20 nt, Artificial Sequence
  spacer sequence CTCN PAM
uccacgcagcccguggcguc

SEQ ID NO: 32955 - RNA, 20 nt, Artificial Sequence
  spacer sequence CTCN PAM
aguucuccuccacgcagccc

SEQ ID NO: 32956 - RNA, 20 nt, Artificial Sequence
  spacer sequence CTCN PAM
ccuccccggcugccaggagu

SEQ ID NO: 32957 - RNA, 20 nt, Artificial Sequence
  spacer sequence CTCN PAM
uccccggcugccaggagugu

SEQ ID NO: 32958 - RNA, 20 nt, Artificial Sequence
  spacer sequence CTCN PAM
ccggcugccaggagugucca

SEQ ID NO: 32959 - RNA, 20 nt, Artificial Sequence
  spacer sequence CTCN PAM
uggcagccggggaggagagc

SEQ ID NO: 32960 - RNA, 20 nt, Artificial Sequence
  spacer sequence CTCN PAM
uugggcaagaaguguugcca

SEQ ID NO: 32961 - RNA, 20 nt, Artificial Sequence
  spacer sequence CTCN PAM
caugcgacgggcggcugugg

SEQ ID NO: 32962 - RNA, 20 nt, Artificial Sequence
  spacer sequence CTCN PAM
gcauagaauggaagccgguc

SEQ ID NO: 32963 - RNA, 20 nt, Artificial Sequence
  spacer sequence CTCN PAM
gaucuugcuguguggaguug

SEQ ID NO: 32964 - RNA, 20 nt, Artificial Sequence
  spacer sequence CTCN PAM
acacagcaagaucagagcag

SEQ ID NO: 32965 - RNA, 20 nt, Artificial Sequence
  spacer sequence CTCN PAM
uggcaaguccccugcaggug

SEQ ID NO: 32966 - RNA, 20 nt, Artificial Sequence
  spacer sequence CTCN PAM
ugcauggcacccaccgcacc

SEQ ID NO: 32967 - RNA, 20 nt, Artificial Sequence
  spacer sequence CTCN PAM
gcacccuccugcauggcacc

SEQ ID NO: 32968 - RNA, 20 nt, Artificial Sequence
  spacer sequence CTCN PAM
cugcggcagauggcggcucu

SEQ ID NO: 32969 - RNA, 20 nt, Artificial Sequence
  spacer sequence CTCN PAM
gcggcagauggcggcucuca

SEQ ID NO: 32970 - RNA, 20 nt, Artificial Sequence
  spacer sequence CTCN PAM
caggacgccaugggucugcg

SEQ ID NO: 32971 - RNA, 20 nt, Artificial Sequence
  spacer sequence CTCN PAM
ggacgccaugggucugcggu

SEQ ID NO: 32972 - RNA, 20 nt, Artificial Sequence
  spacer sequence CTCN PAM
gcagccugaggagcucccuc

SEQ ID NO: 32973 - RNA, 20 nt, Artificial Sequence
  spacer sequence CTCN PAM
ggcugccgagcccccccagu

SEQ ID NO: 32974 - RNA, 20 nt, Artificial Sequence
  spacer sequence CTCN PAM
ucaggcugccgagccccccc

SEQ ID NO: 32975 - RNA, 20 nt, Artificial Sequence
  spacer sequence CTCN PAM
cucuuccugaugcagagccc

SEQ ID NO: 32976 - RNA, 20 nt, Artificial Sequence
  spacer sequence CTCN PAM
uccugaugcagagcccucac

SEQ ID NO: 32977 - RNA, 20 nt, Artificial Sequence
  spacer sequence CTCN PAM
gcaucaggaagagggagcuc

SEQ ID NO: 32978 - RNA, 20 nt, Artificial Sequence
  spacer sequence CTCN PAM
cugcucacugccauggagga

SEQ ID NO: 32979 - RNA, 20 nt, Artificial Sequence
  spacer sequence CTCN PAM
cugccauggaggaggcagga

SEQ ID NO: 32980 - RNA, 20 nt, Artificial Sequence
  spacer sequence CTCN PAM
auggcagugagcagugaggg

SEQ ID NO: 32981 - RNA, 20 nt, Artificial Sequence
  spacer sequence CTCN PAM
uccauggcagugagcaguga

SEQ ID NO: 32982 - RNA, 20 nt, Artificial Sequence
  spacer sequence CTCN PAM
ugccuccuccauggcaguga

SEQ ID NO: 32983 - RNA, 20 nt, Artificial Sequence
  spacer sequence CTCN PAM
aagcgggguccggcgggauc

SEQ ID NO: 32984 - RNA, 20 nt, Artificial Sequence
  spacer sequence CTCN PAM
aggcccagcccuccaagcgg

SEQ ID NO: 32985 - RNA, 20 nt, Artificial Sequence
  spacer sequence CTCN PAM
ggagacuuggagcuugggag

SEQ ID NO: 32986 - RNA, 20 nt, Artificial Sequence
  spacer sequence CTCN PAM
ugaggcguugaccccgcacc

SEQ ID NO: 32987 - RNA, 20 nt, Artificial Sequence
  spacer sequence CTCN PAM
aagucuccugaggcguugac

SEQ ID NO: 32988 - RNA, 20 nt, Artificial Sequence
  spacer sequence CTCN PAM
caagcuccaagucuccugag

SEQ ID NO: 32989 - RNA, 20 nt, Artificial Sequence
  spacer sequence CTCN PAM
cuaacccaccuuccaggugu

SEQ ID NO: 32990 - RNA, 20 nt, Artificial Sequence
  spacer sequence CTCN PAM
gcuuuugagucugagaaguc

SEQ ID NO: 32991 - RNA, 20 nt, Artificial Sequence
  spacer sequence CTCN PAM
aaagcagagcuucccccaag

SEQ ID NO: 32992 - RNA, 20 nt, Artificial Sequence
  spacer sequence CTCN PAM
gacucaaaagcagagcuucc

SEQ ID NO: 32993 - RNA, 20 nt, Artificial Sequence
  spacer sequence CTCN PAM
aaacuugggacgacuucuca

SEQ ID NO: 32994 - RNA, 20 nt, Artificial Sequence
  spacer sequence CTCN PAM
gcugacuuucaucccccauc

SEQ ID NO: 32995 - RNA, 20 nt, Artificial Sequence
  spacer sequence CTCN PAM
agcugacuggaagucggugu

SEQ ID NO: 32996 - RNA, 20 nt, Artificial Sequence
  spacer sequence CTCN PAM
ugcaugaagccccccucaag

SEQ ID NO: 32997 - RNA, 20 nt, Artificial Sequence
  spacer sequence CTCN PAM
ccacaccccaccacacguau

SEQ ID NO: 32998 - RNA, 20 nt, Artificial Sequence
  spacer sequence CTCN PAM
cuggauccugguggguuugg

SEQ ID NO: 32999 - RNA, 20 nt, Artificial Sequence
  spacer sequence CTCN PAM
ggauccugguggguuuggca

SEQ ID NO: 33000 - RNA, 20 nt, Artificial Sequence
  spacer sequence CTCN PAM
uuugggagcggggccugucc

SEQ ID NO: 33001 - RNA, 20 nt, Artificial Sequence
  spacer sequence CTCN PAM
caaaggaggacacuguccau

SEQ ID NO: 33002 - RNA, 20 nt, Artificial Sequence
  spacer sequence CTCN PAM
ugugaagggugggggacagg

SEQ ID NO: 33003 - RNA, 20 nt, Artificial Sequence
  spacer sequence CTCN PAM
ugacaggucagugccugucc

SEQ ID NO: 33004 - RNA, 20 nt, Artificial Sequence
  spacer sequence CTCN PAM
aacccuccugacaggucagu

SEQ ID NO: 33005 - RNA, 20 nt, Artificial Sequence
  spacer sequence CTCN PAM
aggccaccugcuggugccaa

SEQ ID NO: 33006 - RNA, 20 nt, Artificial Sequence
  spacer sequence CTCN PAM
gagcacgcgcgaucaggaag

SEQ ID NO: 33007 - RNA, 20 nt, Artificial Sequence
  spacer sequence CTCN PAM
gagcgcuccaggccaccugc

SEQ ID NO: 33008 - RNA, 20 nt, Artificial Sequence
  spacer sequence CTCN PAM
ggccuuccugaucgcgcgug

SEQ ID NO: 33009 - RNA, 20 nt, Artificial Sequence
  spacer sequence CTCN PAM
agugugcccucccuggccuu

SEQ ID NO: 33010 - RNA, 20 nt, Artificial Sequence
  spacer sequence CTCN PAM
cuggccuugugaagucaucu

SEQ ID NO: 33011 - RNA, 20 nt, Artificial Sequence
  spacer sequence CTCN PAM
agccagacuuuaagaugacu

SEQ ID NO: 33012 - RNA, 20 nt, Artificial Sequence
  spacer sequence CTCN PAM
gacuuggauucugggaagcu

SEQ ID NO: 33013 - RNA, 20 nt, Artificial Sequence
  spacer sequence CTCN PAM
acaggauguggcgaccccgg

SEQ ID NO: 33014 - RNA, 20 nt, Artificial Sequence
  spacer sequence CTCN PAM
ccaguaggccaggcaugggc

SEQ ID NO: 33015 - RNA, 20 nt, Artificial Sequence
  spacer sequence CTCN PAM
ccccaguaggccaggcaugg

SEQ ID NO: 33016 - RNA, 20 nt, Artificial Sequence
  spacer sequence CTCN PAM
guccucuccccaguaggcca

SEQ ID NO: 33017 - RNA, 20 nt, Artificial Sequence
  spacer sequence CTCN PAM
gaggggucaccucgagcgcc

SEQ ID NO: 33018 - RNA, 20 nt, Artificial Sequence
  spacer sequence CTCN PAM
gagccucuguccucucccca

SEQ ID NO: 33019 - RNA, 20 nt, Artificial Sequence
  spacer sequence CTCN PAM
agcgcccaggccauuguguu

SEQ ID NO: 33020 - RNA, 20 nt, Artificial Sequence
  spacer sequence CTCN PAM
aggugaccccucugagccuc

SEQ ID NO: 33021 - RNA, 20 nt, Artificial Sequence
  spacer sequence CTCN PAM
aguuccaugaccgugugcug

SEQ ID NO: 33022 - RNA, 20 nt, Artificial Sequence
  spacer sequence CTCN PAM
ccaguuccaugaccgugugc

SEQ ID NO: 33023 - RNA, 20 nt, Artificial Sequence
  spacer sequence CTCN PAM
cuccaguuccaugaccgugu

SEQ ID NO: 33024 - RNA, 20 nt, Artificial Sequence
  spacer sequence CTCN PAM
cucuccaguuccaugaccgu

SEQ ID NO: 33025 - RNA, 20 nt, Artificial Sequence
  spacer sequence CTCN PAM
gugacuuuccuacaauauuu

SEQ ID NO: 33026 - RNA, 20 nt, Artificial Sequence
  spacer sequence CTCN PAM
cucugugacuuuccuacaau

SEQ ID NO: 33027 - RNA, 20 nt, Artificial Sequence
  spacer sequence CTCN PAM
gcggagagaggagaaagccg

SEQ ID NO: 33028 - RNA, 20 nt, Artificial Sequence
  spacer sequence CTCN PAM
gcugaguccuuccucccucu

SEQ ID NO: 33029 - RNA, 20 nt, Artificial Sequence
  spacer sequence CTCN PAM
ccgcugaguccuuccucccu

SEQ ID NO: 33030 - RNA, 20 nt, Artificial Sequence
  spacer sequence CTCN PAM
cuccgcugaguccuuccucc

SEQ ID NO: 33031 - RNA, 20 nt, Artificial Sequence
  spacer sequence CTCN PAM
ucucuccgcugaguccuucc

SEQ ID NO: 33032 - RNA, 20 nt, Artificial Sequence
  spacer sequence CTCN PAM
gggcagcuucgaggauaccc

SEQ ID NO: 33033 - RNA, 20 nt, Artificial Sequence
  spacer sequence CTCN PAM
aagcugcccagaggcggcuu

SEQ ID NO: 33034 - RNA, 20 nt, Artificial Sequence
  spacer sequence CTCN PAM
gagccaggcccauggcaggu

SEQ ID NO: 33035 - RNA, 20 nt, Artificial Sequence
  spacer sequence CTCN PAM
gagcugcauggcccccggcc

SEQ ID NO: 33036 - RNA, 20 nt, Artificial Sequence
  spacer sequence CTCN PAM
ggguuuauuggguggcugug

SEQ ID NO: 33037 - RNA, 20 nt, Artificial Sequence
  spacer sequence CTCN PAM
uuccacagccacccaauaaa

SEQ ID NO: 33038 - RNA, 20 nt, Artificial Sequence
  spacer sequence CTCN PAM
ggaugucuccuuccacagcc

SEQ ID NO: 33039 - RNA, 20 nt, Artificial Sequence
  spacer sequence CTCN PAM
uggcugggccccuagaggcc

SEQ ID NO: 33040 - RNA, 20 nt, Artificial Sequence
  spacer sequence CTCN PAM
aggggcccagccaggagccc

SEQ ID NO: 33041 - RNA, 20 nt, Artificial Sequence
  spacer sequence CTCN PAM
gcacagguacaaguagucac

SEQ ID NO: 33042 - RNA, 20 nt, Artificial Sequence
  spacer sequence CTCN PAM
cucugcacagguacaaguag

SEQ ID NO: 33043 - RNA, 20 nt, Artificial Sequence
  spacer sequence CTCN PAM
ggccugaccaacaaucuugc

SEQ ID NO: 33044 - RNA, 20 nt, Artificial Sequence
  spacer sequence CTCN PAM
cuggccugaccaacaaucuu

SEQ ID NO: 33045 - RNA, 20 nt, Artificial Sequence
  spacer sequence CTCN PAM
cccagaucacggcccucucu

SEQ ID NO: 33046 - RNA, 20 nt, Artificial Sequence
  spacer sequence CTCN PAM
ccgcacugcaacagccuccc

SEQ ID NO: 33047 - RNA, 20 nt, Artificial Sequence
  spacer sequence CTCN PAM
uggggccgugccggccuuuc

SEQ ID NO: 33048 - RNA, 20 nt, Artificial Sequence
  spacer sequence CTCN PAM
cuuggugcauuuggaguuau

SEQ ID NO: 33049 - RNA, 20 nt, Artificial Sequence
  spacer sequence CTCN PAM
uggugcauuuggaguuauuc

SEQ ID NO: 33050 - RNA, 20 nt, Artificial Sequence
  spacer sequence CTCN PAM
aaaugcaccaagagagcccc

SEQ ID NO: 33051 - RNA, 20 nt, Artificial Sequence
  spacer sequence CTCN PAM
gaauaacuccaaaugcacca

SEQ ID NO: 33052 - RNA, 20 nt, Artificial Sequence
  spacer sequence CTCN PAM
ugggcucugucagcacucug

SEQ ID NO: 33053 - RNA, 20 nt, Artificial Sequence
  spacer sequence CTCN PAM
gucagcacucuggccuggau

SEQ ID NO: 33054 - RNA, 20 nt, Artificial Sequence
  spacer sequence CTCN PAM
ggccuggaucacucuggggc

SEQ ID NO: 33055 - RNA, 20 nt, Artificial Sequence
  spacer sequence CTCN PAM
ggggcaccgugggcacugca

SEQ ID NO: 33056 - RNA, 20 nt, Artificial Sequence
  spacer sequence CTCN PAM
auucacuccgggucaggagu

SEQ ID NO: 33057 - RNA, 20 nt, Artificial Sequence
  spacer sequence CTCN PAM
gggucaggaguacccccagu

SEQ ID NO: 33058 - RNA, 20 nt, Artificial Sequence
  spacer sequence CTCN PAM
ugacccggagugaauggagg

SEQ ID NO: 33059 - RNA, 20 nt, Artificial Sequence
  spacer sequence CTCN PAM
ccccagcaggacacugggug

SEQ ID NO: 33060 - RNA, 20 nt, Artificial Sequence
  spacer sequence CTCN PAM
ccccccagcaggacacuggg

SEQ ID NO: 33061 - RNA, 20 nt, Artificial Sequence
  spacer sequence CTCN PAM
cagacaguggcucucccccc

SEQ ID NO: 33062 - RNA, 20 nt, Artificial Sequence
  spacer sequence CTCN PAM
uugugguuuauggcuugucc

SEQ ID NO: 33063 - RNA, 20 nt, Artificial Sequence
  spacer sequence CTCN PAM
uuugauuccugugaaugggc

SEQ ID NO: 33064 - RNA, 20 nt, Artificial Sequence
  spacer sequence CTCN PAM
aggcccauucacaggaauca

SEQ ID NO: 33065 - RNA, 20 nt, Artificial Sequence
  spacer sequence CTCN PAM
ugacuggcucgccuuggcuc

SEQ ID NO: 33066 - RNA, 20 nt, Artificial Sequence
  spacer sequence CTCN PAM
ccuuggcuccaauggucugg

SEQ ID NO: 33067 - RNA, 20 nt, Artificial Sequence
  spacer sequence CTCN PAM
aauggucuggagcaggccgg

SEQ ID NO: 33068 - RNA, 20 nt, Artificial Sequence
  spacer sequence CTCN PAM
agaccauuggagccaaggcg

SEQ ID NO: 33069 - RNA, 20 nt, Artificial Sequence
  spacer sequence CTCN PAM
ccaguggcccagagcuagca

SEQ ID NO: 33070 - RNA, 20 nt, Artificial Sequence
  spacer sequence CTCN PAM
gggccacuggggagcugcug

SEQ ID NO: 33071 - RNA, 20 nt, Artificial Sequence
  spacer sequence CTCN PAM
aacccuuggcuuugccagag

SEQ ID NO: 33072 - RNA, 20 nt, Artificial Sequence
  spacer sequence CTCN PAM
ggcaaagccaaggguuagag

SEQ ID NO: 33073 - RNA, 20 nt, Artificial Sequence
  spacer sequence CTCN PAM
cuggcaaagccaaggguuag

SEQ ID NO: 33074 - RNA, 20 nt, Artificial Sequence
  spacer sequence CTCN PAM
gucucucuggcaaagccaag

SEQ ID NO: 33075 - RNA, 20 nt, Artificial Sequence
  spacer sequence CTCN PAM
gugccucagucucucuggca

SEQ ID NO: 33076 - RNA, 20 nt, Artificial Sequence
  spacer sequence CTCN PAM
ucugugccucagucucucug

SEQ ID NO: 33077 - RNA, 20 nt, Artificial Sequence
  spacer sequence CTCN PAM
acuccucugugccucagucu

SEQ ID NO: 33078 - RNA, 20 nt, Artificial Sequence
  spacer sequence CTCN PAM
ggaucuuccacccccugggg

SEQ ID NO: 33079 - RNA, 20 nt, Artificial Sequence
  spacer sequence CTCN PAM
cagcuccggaucuuccaccc

SEQ ID NO: 33080 - RNA, 20 nt, Artificial Sequence
  spacer sequence CTCN PAM
uccacugcccgccccgcaca

SEQ ID NO: 33081 - RNA, 20 nt, Artificial Sequence
  spacer sequence CTCN PAM
acugcccgccccgcacagag

SEQ ID NO: 33082 - RNA, 20 nt, Artificial Sequence
  spacer sequence CTCN PAM
gugcggggcgggcaguggag

SEQ ID NO: 33083 - RNA, 20 nt, Artificial Sequence
  spacer sequence CTCN PAM
uggucaggcggcuauguuca

SEQ ID NO: 33084 - RNA, 20 nt, Artificial Sequence
  spacer sequence CTCN PAM
gauugacgggucgcaccaug

SEQ ID NO: 33085 - RNA, 20 nt, Artificial Sequence
  spacer sequence CTCN PAM
guucacagaagacagcacaa

SEQ ID NO: 33086 - RNA, 20 nt, Artificial Sequence
  spacer sequence CTCN PAM
gggauucugacaucaugaca

SEQ ID NO: 33087 - RNA, 20 nt, Artificial Sequence
  spacer sequence CTCN PAM
cagggauucugacaucauga

SEQ ID NO: 33088 - RNA, 20 nt, Artificial Sequence
  spacer sequence CTCN PAM
gccaaaagcccugucacagc

SEQ ID NO: 33089 - RNA, 20 nt, Artificial Sequence
  spacer sequence CTCN PAM
gccuauaagcaucugucgaa

SEQ ID NO: 33090 - RNA, 20 nt, Artificial Sequence
  spacer sequence CTCN PAM
aggcguugccaaggagaaca

SEQ ID NO: 33091 - RNA, 20 nt, Artificial Sequence
  spacer sequence CTCN PAM
uuggcaacgccuggagccaa

SEQ ID NO: 33092 - RNA, 20 nt, Artificial Sequence
  spacer sequence CTCN PAM
caggcggaccaguguucucc

SEQ ID NO: 33093 - RNA, 20 nt, Artificial Sequence
  spacer sequence CTCN PAM
cugccagccccgcccuccca

SEQ ID NO: 33094 - RNA, 20 nt, Artificial Sequence
  spacer sequence CTCN PAM
cccugccagccccgcccucc

SEQ ID NO: 33095 - RNA, 20 nt, Artificial Sequence
  spacer sequence CTCN PAM
uccucucccugccagccccg

SEQ ID NO: 33096 - RNA, 20 nt, Artificial Sequence
  spacer sequence CTCN PAM
uucagcacacagcagcgcgu

SEQ ID NO: 33097 - RNA, 20 nt, Artificial Sequence
  spacer sequence CTCN PAM
uguguucuguggaccccaca

SEQ ID NO: 33098 - RNA, 20 nt, Artificial Sequence
  spacer sequence CTCN PAM
agcccacgccugcagggugu

SEQ ID NO: 33099 - RNA, 20 nt, Artificial Sequence
  spacer sequence CTCN PAM
ccagcagggucagaugcccc

SEQ ID NO: 33100 - RNA, 20 nt, Artificial Sequence
  spacer sequence CTCN PAM
ccccagcagggucagaugcc

SEQ ID NO: 33101 - RNA, 20 nt, Artificial Sequence
  spacer sequence CTCN PAM
cucuccccagcagggucaga

SEQ ID NO: 33102 - RNA, 20 nt, Artificial Sequence
  spacer sequence CTCN PAM
auagccuggacucccucucc

SEQ ID NO: 33103 - RNA, 20 nt, Artificial Sequence
  spacer sequence CTCN PAM
cuggccugaggcagugggug

SEQ ID NO: 33104 - RNA, 20 nt, Artificial Sequence
  spacer sequence CTCN PAM
ggccagugagcccagcccgc

SEQ ID NO: 33105 - RNA, 20 nt, Artificial Sequence
  spacer sequence CTCN PAM
agggacuuuccugccccuaa

SEQ ID NO: 33106 - RNA, 20 nt, Artificial Sequence
  spacer sequence CTCN PAM
uccugaugcucuggaagaag

SEQ ID NO: 33107 - RNA, 20 nt, Artificial Sequence
  spacer sequence CTCN PAM
ggaagaagagaaggguuccc

SEQ ID NO: 33108 - RNA, 20 nt, Artificial Sequence
  spacer sequence CTCN PAM
ucuuccagagcaucaggaag

SEQ ID NO: 33109 - RNA, 20 nt, Artificial Sequence
  spacer sequence CTCN PAM
ugagauugugcacggagcug

SEQ ID NO: 33110 - RNA, 20 nt, Artificial Sequence
  spacer sequence CTCN PAM
agaggcagaaguccaggccc

SEQ ID NO: 33111 - RNA, 20 nt, Artificial Sequence
  spacer sequence CTCN PAM
gugcacaaucucaagaggca

SEQ ID NO: 33112 - RNA, 20 nt, Artificial Sequence
  spacer sequence CTCN PAM
gcuccgugcacaaucucaag

SEQ ID NO: 33113 - RNA, 20 nt, Artificial Sequence
  spacer sequence CTCN PAM
gccagucacacucagcuccg

SEQ ID NO: 33114 - RNA, 20 nt, Artificial Sequence
  spacer sequence CTCN PAM
gggcuccgccagucacacuc

SEQ ID NO: 33115 - RNA, 20 nt, Artificial Sequence
  spacer sequence CTCN PAM
ccacagaccccaccuggcuc

SEQ ID NO: 33116 - RNA, 20 nt, Artificial Sequence
  spacer sequence CTCN PAM
uccuggcuuggucccccggc

SEQ ID NO: 33117 - RNA, 20 nt, Artificial Sequence
  spacer sequence CTCN PAM
uggcuuggucccccggccca

SEQ ID NO: 33118 - RNA, 20 nt, Artificial Sequence
  spacer sequence CTCN PAM
augggggcaguuggcaggcg

SEQ ID NO: 33119 - RNA, 20 nt, Artificial Sequence
  spacer sequence CTCN PAM
ggugcugccaggaggucagg

SEQ ID NO: 33120 - RNA, 20 nt, Artificial Sequence
  spacer sequence CTCN PAM
uggcagcaccagagugggcu

SEQ ID NO: 33121 - RNA, 20 nt, Artificial Sequence
  spacer sequence CTCN PAM
uuguggucagccuaggccag

SEQ ID NO: 33122 - RNA, 20 nt, Artificial Sequence
  spacer sequence CTCN PAM
ggccuaggcugaccacaaag

SEQ ID NO: 33123 - RNA, 20 nt, Artificial Sequence
  spacer sequence CTCN PAM
gcagauggacuuuacgcaua

SEQ ID NO: 33124 - RNA, 20 nt, Artificial Sequence
  spacer sequence CTCN PAM
cuugcugcgugccauucggg

SEQ ID NO: 33125 - RNA, 20 nt, Artificial Sequence
  spacer sequence CTCN PAM
ucugccuguuaaagcaaaag

SEQ ID NO: 33126 - RNA, 20 nt, Artificial Sequence
  spacer sequence CTCN PAM
auccacgguggccggcgcag

SEQ ID NO: 33127 - RNA, 20 nt, Artificial Sequence
  spacer sequence CTCN PAM
acaccuggcaggugcucaau

SEQ ID NO: 33128 - RNA, 20 nt, Artificial Sequence
  spacer sequence CTCN PAM
caggaucugcaagccuggca

SEQ ID NO: 33129 - RNA, 20 nt, Artificial Sequence
  spacer sequence CTCN PAM
agguugcaagggaagaagug

SEQ ID NO: 33130 - RNA, 20 nt, Artificial Sequence
  spacer sequence CTCN PAM
acuucuucccuugcaaccug

SEQ ID NO: 33131 - RNA, 20 nt, Artificial Sequence
  spacer sequence CTCN PAM
ucccacgccucccccacuaa

SEQ ID NO: 33132 - RNA, 20 nt, Artificial Sequence
  spacer sequence CTCN PAM
cccacuaaugagaacacccc

SEQ ID NO: 33133 - RNA, 20 nt, Artificial Sequence
  spacer sequence CTCN PAM
uuagugggggaggcguggga

SEQ ID NO: 33134 - RNA, 20 nt, Artificial Sequence
  spacer sequence CTCN PAM
caccccacaaacccaaaagg

SEQ ID NO: 33135 - RNA, 20 nt, Artificial Sequence
  spacer sequence CTCN PAM
uacagaccucacaccccaca

SEQ ID NO: 33136 - RNA, 20 nt, Artificial Sequence
  spacer sequence CTCN PAM
gacacuggaagucguggcuc

SEQ ID NO: 33137 - RNA, 20 nt, Artificial Sequence
  spacer sequence CTCN PAM
cccacccagcgggccccuca

SEQ ID NO: 33138 - RNA, 20 nt, Artificial Sequence
  spacer sequence CTCN PAM
cacccagcgggccccucaga

SEQ ID NO: 33139 - RNA, 20 nt, Artificial Sequence
  spacer sequence CTCN PAM
gaggcagggugcaggagcca

SEQ ID NO: 33140 - RNA, 20 nt, Artificial Sequence
  spacer sequence CTCN PAM
gaggggcccgcuggguggga

SEQ ID NO: 33141 - RNA, 20 nt, Artificial Sequence
  spacer sequence CTCN PAM
ugcacccugccucugagggg

SEQ ID NO: 33142 - RNA, 20 nt, Artificial Sequence
  spacer sequence CTCN PAM
ccgaccccuucaucugcgua

SEQ ID NO: 33143 - RNA, 20 nt, Artificial Sequence
  spacer sequence CTCN PAM
guccacacgccgccagccaa

SEQ ID NO: 33144 - RNA, 20 nt, Artificial Sequence
  spacer sequence CTCN PAM
gccugcaccuuggcuggcgg

SEQ ID NO: 33145 - RNA, 20 nt, Artificial Sequence
  spacer sequence CTCN PAM
aggcuugcucagccugcacc

SEQ ID NO: 33146 - RNA, 20 nt, Artificial Sequence
  spacer sequence CTCN PAM
gcuccaggcuugcucagccu

SEQ ID NO: 33147 - RNA, 20 nt, Artificial Sequence
  spacer sequence CTCN PAM
ugggcuugcuacggggcugg

SEQ ID NO: 33148 - RNA, 20 nt, Artificial Sequence
  spacer sequence CTCN PAM
cgugggcuugcuacggggcu

SEQ ID NO: 33149 - RNA, 20 nt, Artificial Sequence
  spacer sequence CTCN PAM
uccuuuuggccucugcccgc

SEQ ID NO: 33150 - RNA, 20 nt, Artificial Sequence
  spacer sequence CTCN PAM
uuuuggccucugcccgcgcc

SEQ ID NO: 33151 - RNA, 20 nt, Artificial Sequence
  spacer sequence CTCN PAM
gcccgcgcccggcuuccugg

SEQ ID NO: 33152 - RNA, 20 nt, Artificial Sequence
  spacer sequence CTCN PAM
gacguuuacuugugugagag

SEQ ID NO: 33153 - RNA, 20 nt, Artificial Sequence
  spacer sequence CTCN PAM
cacaaguaaacgucggaguc

SEQ ID NO: 33154 - RNA, 20 nt, Artificial Sequence
  spacer sequence CTCN PAM
cacacaaguaaacgucggag

SEQ ID NO: 33155 - RNA, 20 nt, Artificial Sequence
  spacer sequence CTCN PAM
cagacacuguccaucaacug

SEQ ID NO: 33156 - RNA, 20 nt, Artificial Sequence
  spacer sequence CTCN PAM
gcauguuucugaugugccgg

SEQ ID NO: 33157 - RNA, 20 nt, Artificial Sequence
  spacer sequence CTCN PAM
cucacgaccuggugagguug

SEQ ID NO: 33158 - RNA, 20 nt, Artificial Sequence
  spacer sequence CTCN PAM
cgaccuggugagguuggcag

SEQ ID NO: 33159 - RNA, 20 nt, Artificial Sequence
  spacer sequence CTCN PAM
ccaggucgugagugagaagc

SEQ ID NO: 33160 - RNA, 20 nt, Artificial Sequence
  spacer sequence CTCN PAM
uggcugccaaccucaccagg

SEQ ID NO: 33161 - RNA, 20 nt, Artificial Sequence
  spacer sequence CTCN PAM
ggauguuuuaaucaauaaaa

SEQ ID NO: 33162 - RNA, 20 nt, Artificial Sequence
  spacer sequence CTCN PAM
agggcccuggcacaaagucc

SEQ ID NO: 33163 - RNA, 20 nt, Artificial Sequence
  spacer sequence CTCN PAM
ucaguggcagggacugccuc

SEQ ID NO: 33164 - RNA, 20 nt, Artificial Sequence
  spacer sequence CTCN PAM
gggaagucccggaaagcagg

SEQ ID NO: 33165 - RNA, 20 nt, Artificial Sequence
  spacer sequence CTCN PAM
cuggucuacagacagaagcc

SEQ ID NO: 33166 - RNA, 20 nt, Artificial Sequence
  spacer sequence CTCN PAM
ugagugguaguaaaagacac

SEQ ID NO: 33167 - RNA, 20 nt, Artificial Sequence
  spacer sequence CTCN PAM
ggagccaccggcgaacaccu

SEQ ID NO: 33168 - RNA, 20 nt, Artificial Sequence
  spacer sequence CTCN PAM
caaauaucucaacagaaaca

SEQ ID NO: 33169 - RNA, 20 nt, Artificial Sequence
  spacer sequence CTCN PAM
aauaucucaacagaaacaca

SEQ ID NO: 33170 - RNA, 20 nt, Artificial Sequence
  spacer sequence CTCN PAM
acagaaacacacaguguggc

SEQ ID NO: 33171 - RNA, 20 nt, Artificial Sequence
  spacer sequence CTCN PAM
cgccugucauccuagcacuu

SEQ ID NO: 33172 - RNA, 20 nt, Artificial Sequence
  spacer sequence CTCN PAM
caaagugcuaggaugacagg

SEQ ID NO: 33173 - RNA, 20 nt, Artificial Sequence
  spacer sequence CTCN PAM
gccucccaaagugcuaggau

SEQ ID NO: 33174 - RNA, 20 nt, Artificial Sequence
  spacer sequence CTCN PAM
ccaccgcaggugacccgccc

SEQ ID NO: 33175 - RNA, 20 nt, Artificial Sequence
  spacer sequence CTCN PAM
agacacagcuaugugaaacg

SEQ ID NO: 33176 - RNA, 20 nt, Artificial Sequence
  spacer sequence CTCN PAM
gauuccauaaggacugagac

SEQ ID NO: 33177 - RNA, 20 nt, Artificial Sequence
  spacer sequence CTCN PAM
guccuuauggaaucugagac

SEQ ID NO: 33178 - RNA, 20 nt, Artificial Sequence
  spacer sequence CTCN PAM
guaaugaaagucuuuuauac

SEQ ID NO: 33179 - RNA, 20 nt, Artificial Sequence
  spacer sequence CTCN PAM
uggcccugccagacucacca

SEQ ID NO: 33180 - RNA, 20 nt, Artificial Sequence
  spacer sequence CTCN PAM
ccauuggcugacauuuuacc

SEQ ID NO: 33181 - RNA, 20 nt, Artificial Sequence
  spacer sequence CTCN PAM
ugccccacccccagugaacu

SEQ ID NO: 33182 - RNA, 20 nt, Artificial Sequence
  spacer sequence CTCN PAM
cucugucgcccaggcuggag

SEQ ID NO: 33183 - RNA, 20 nt, Artificial Sequence
  spacer sequence CTCN PAM
gucgcccaggcuggagugca

SEQ ID NO: 33184 - RNA, 20 nt, Artificial Sequence
  spacer sequence CTCN PAM
agccugggcgacagagugag

SEQ ID NO: 33185 - RNA, 20 nt, Artificial Sequence
  spacer sequence CTCN PAM
gugcaaccuccgccucccgg

SEQ ID NO: 33186 - RNA, 20 nt, Artificial Sequence
  spacer sequence CTCN PAM
gccucccggguucaagcagu

SEQ ID NO: 33187 - RNA, 20 nt, Artificial Sequence
  spacer sequence CTCN PAM
cggguucaagcaguacaccu

SEQ ID NO: 33188 - RNA, 20 nt, Artificial Sequence
  spacer sequence CTCN PAM
agcucagccucccgaguggc

SEQ ID NO: 33189 - RNA, 20 nt, Artificial Sequence
  spacer sequence CTCN PAM
agguguacugcuugaacccg

SEQ ID NO: 33190 - RNA, 20 nt, Artificial Sequence
  spacer sequence CTCN PAM
gccucccgaguggcuaggau

SEQ ID NO: 33191 - RNA, 20 nt, Artificial Sequence
  spacer sequence CTCN PAM
cgaguggcuaggauuacagg

SEQ ID NO: 33192 - RNA, 20 nt, Artificial Sequence
  spacer sequence CTCN PAM
ggaggcugagcucgaggugu

SEQ ID NO: 33193 - RNA, 20 nt, Artificial Sequence
  spacer sequence CTCN PAM
guggugcgcaccuguaaucc

SEQ ID NO: 33194 - RNA, 20 nt, Artificial Sequence
  spacer sequence CTCN PAM
acuaaaaauacaaaaauuag

SEQ ID NO: 33195 - RNA, 20 nt, Artificial Sequence
  spacer sequence CTCN PAM
aacuccugaccucaggugau

SEQ ID NO: 33196 - RNA, 20 nt, Artificial Sequence
  spacer sequence CTCN PAM
ugaccucaggugauccgccc

SEQ ID NO: 33197 - RNA, 20 nt, Artificial Sequence
  spacer sequence CTCN PAM
ggugauccgcccaccucagc

SEQ ID NO: 33198 - RNA, 20 nt, Artificial Sequence
  spacer sequence CTCN PAM
gccuugcaaagugcugggau

SEQ ID NO: 33199 - RNA, 20 nt, Artificial Sequence
  spacer sequence CTCN PAM
cgccuguaaucccagcacuu

SEQ ID NO: 33200 - RNA, 20 nt, Artificial Sequence
  spacer sequence CTCN PAM
aauauuucaguagaaacaca

SEQ ID NO: 33201 - RNA, 20 nt, Artificial Sequence
  spacer sequence CTCN PAM
caaauauuucaguagaaaca

SEQ ID NO: 33202 - RNA, 20 nt, Artificial Sequence
  spacer sequence CTCN PAM
agcuacucucaaauauuuca

SEQ ID NO: 33203 - RNA, 20 nt, Artificial Sequence
  spacer sequence CTCN PAM
guguacacauaaaggggacu

SEQ ID NO: 33204 - RNA, 20 nt, Artificial Sequence
  spacer sequence CTCN PAM
cacaugaacacagcacagug

SEQ ID NO: 33205 - RNA, 20 nt, Artificial Sequence
  spacer sequence CTCN PAM
caugaacacagcacagugau

SEQ ID NO: 33206 - RNA, 20 nt, Artificial Sequence
  spacer sequence CTCN PAM
auuuugaucacugugcugug

SEQ ID NO: 33207 - RNA, 20 nt, Artificial Sequence
  spacer sequence CTCN PAM
cgccugucaucccagcacuu

SEQ ID NO: 33208 - RNA, 20 nt, Artificial Sequence
  spacer sequence CTCN PAM
aagugcugggaugacaggcg

SEQ ID NO: 33209 - RNA, 20 nt, Artificial Sequence
  spacer sequence CTCN PAM
caaagugcugggaugacagg

SEQ ID NO: 33210 - RNA, 20 nt, Artificial Sequence
  spacer sequence CTCN PAM
gccucucaaagugcugggau

SEQ ID NO: 33211 - RNA, 20 nt, Artificial Sequence
  spacer sequence CTCN PAM
ugauccaccagccucggccu

SEQ ID NO: 33212 - RNA, 20 nt, Artificial Sequence
  spacer sequence CTCN PAM
ugaccucgugauccaccagc

SEQ ID NO: 33213 - RNA, 20 nt, Artificial Sequence
  spacer sequence CTCN PAM
aucucuugaccucgugaucc

SEQ ID NO: 33214 - RNA, 20 nt, Artificial Sequence
  spacer sequence CTCN PAM
acuaaaaauacaaaaauuag

SEQ ID NO: 33215 - RNA, 20 nt, Artificial Sequence
  spacer sequence CTCN PAM
ggaggcugaggcaggagaau

SEQ ID NO: 33216 - RNA, 20 nt, Artificial Sequence
  spacer sequence CTCN PAM
cgaguagcugggacuacagg

SEQ ID NO: 33217 - RNA, 20 nt, Artificial Sequence
  spacer sequence CTCN PAM
gccucccgaguagcugggac

SEQ ID NO: 33218 - RNA, 20 nt, Artificial Sequence
  spacer sequence CTCN PAM
ugccucagccucccgaguag

SEQ ID NO: 33219 - RNA, 20 nt, Artificial Sequence
  spacer sequence CTCN PAM
cggguucaagcgauucuccu

SEQ ID NO: 33220 - RNA, 20 nt, Artificial Sequence
  spacer sequence CTCN PAM
gccucccggguucaagcgau

SEQ ID NO: 33221 - RNA, 20 nt, Artificial Sequence
  spacer sequence CTCN PAM
cugcaaccuccgccucccgg

SEQ ID NO: 33222 - RNA, 20 nt, Artificial Sequence
  spacer sequence CTCN PAM
gcucacugcaaccuccgccu

SEQ ID NO: 33223 - RNA, 20 nt, Artificial Sequence
  spacer sequence CTCN PAM
agccugggcaacacagcgag

SEQ ID NO: 33224 - RNA, 20 nt, Artificial Sequence
  spacer sequence CTCN PAM
cuguguugcccaggcuggag

SEQ ID NO: 33225 - RNA, 20 nt, Artificial Sequence
  spacer sequence CTCN PAM
auuuuuuuuugaaaaauugu

SEQ ID NO: 33226 - RNA, 20 nt, Artificial Sequence
  spacer sequence CTCN PAM
aauacaauuuuaaaaaauaa

SEQ ID NO: 33227 - RNA, 20 nt, Artificial Sequence
  spacer sequence CTCN PAM
uaaauaaaauuaaaaaaaua

SEQ ID NO: 33228 - RNA, 20 nt, Artificial Sequence
  spacer sequence CTCN PAM
uaaauaaaauuaaaaaaaaa

SEQ ID NO: 33229 - RNA, 20 nt, Artificial Sequence
  spacer sequence CTCN PAM
ucucuuaaauaaaauuaaaa

SEQ ID NO: 33230 - RNA, 20 nt, Artificial Sequence
  spacer sequence CTCN PAM
gucaccccugcuggagugca

SEQ ID NO: 33231 - RNA, 20 nt, Artificial Sequence
  spacer sequence CTCN PAM
agcaggggugacagagaucu

SEQ ID NO: 33232 - RNA, 20 nt, Artificial Sequence
  spacer sequence CTCN PAM
cugcagccucgaccuugacu

SEQ ID NO: 33233 - RNA, 20 nt, Artificial Sequence
  spacer sequence CTCN PAM
accuugacucaaacgauccu

SEQ ID NO: 33234 - RNA, 20 nt, Artificial Sequence
  spacer sequence CTCN PAM
aacgauccuucugccucagc

SEQ ID NO: 33235 - RNA, 20 nt, Artificial Sequence
  spacer sequence CTCN PAM
gccucccaaguagcugggac

SEQ ID NO: 33236 - RNA, 20 nt, Artificial Sequence
  spacer sequence CTCN PAM
caaguagcugggacuacagg

SEQ ID NO: 33237 - RNA, 20 nt, Artificial Sequence
  spacer sequence CTCN PAM
aggugguggcaggcaccugu

SEQ ID NO: 33238 - RNA, 20 nt, Artificial Sequence
  spacer sequence CTCN PAM
uuacguugcccaggcugguc

SEQ ID NO: 33239 - RNA, 20 nt, Artificial Sequence
  spacer sequence CTCN PAM
uggccucccguaaugcugug

SEQ ID NO: 33240 - RNA, 20 nt, Artificial Sequence
  spacer sequence CTCN PAM
cguaaugcugugauuauagg

SEQ ID NO: 33241 - RNA, 20 nt, Artificial Sequence
  spacer sequence CTCN PAM
gcugggcgcagaucacgccu

SEQ ID NO: 33242 - RNA, 20 nt, Artificial Sequence
  spacer sequence CTCN PAM
gcugagcguuucuagcccuu

SEQ ID NO: 33243 - RNA, 20 nt, Artificial Sequence
  spacer sequence CTCN PAM
gcugagaaaccugaaacagg

SEQ ID NO: 33244 - RNA, 20 nt, Artificial Sequence
  spacer sequence CTCN PAM
ucagaccaguccaguuucgg

SEQ ID NO: 33245 - RNA, 20 nt, Artificial Sequence
  spacer sequence CTCN PAM
cuggcagaaggaacucguca

SEQ ID NO: 33246 - RNA, 20 nt, Artificial Sequence
  spacer sequence CTCN PAM
acccccaccucacuggcaga

SEQ ID NO: 33247 - RNA, 20 nt, Artificial Sequence
  spacer sequence CTCN PAM
aagcagcccaguacccccuc

SEQ ID NO: 33248 - RNA, 20 nt, Artificial Sequence
  spacer sequence CTCN PAM
aaaaaaaaaaaaaaaacaaa

SEQ ID NO: 33249 - RNA, 20 nt, Artificial Sequence
  spacer sequence CTCN PAM
uuuacacaauccuuuggaau

SEQ ID NO: 33250 - RNA, 20 nt, Artificial Sequence
  spacer sequence CTCN PAM
ugcugggugccgggcccugc

SEQ ID NO: 33251 - RNA, 20 nt, Artificial Sequence
  spacer sequence CTCN PAM
gcgcgggcacagccuaugga

SEQ ID NO: 33252 - RNA, 20 nt, Artificial Sequence
  spacer sequence CTCN PAM
auaggcugugcccgcgcuga

SEQ ID NO: 33253 - RNA, 20 nt, Artificial Sequence
  spacer sequence CTCN PAM
ccauaggcugugcccgcgcu

SEQ ID NO: 33254 - RNA, 20 nt, Artificial Sequence
  spacer sequence CTCN PAM
cucuccauaggcugugcccg

SEQ ID NO: 33255 - RNA, 20 nt, Artificial Sequence
  spacer sequence CTCN PAM
auaggcugugccucacucuc

SEQ ID NO: 33256 - RNA, 20 nt, Artificial Sequence
  spacer sequence CTCN PAM
ccauaggcugugccucacuc

SEQ ID NO: 33257 - RNA, 20 nt, Artificial Sequence
  spacer sequence CTCN PAM
cucuccauaggcugugccuc

SEQ ID NO: 33258 - RNA, 20 nt, Artificial Sequence
  spacer sequence CTCN PAM
gcgugccucacucuccauag

SEQ ID NO: 33259 - RNA, 20 nt, Artificial Sequence
  spacer sequence CTCN PAM
cuccucccacggucucuagg

SEQ ID NO: 33260 - RNA, 20 nt, Artificial Sequence
  spacer sequence CTCN PAM
ucccacggucucuaggccug

SEQ ID NO: 33261 - RNA, 20 nt, Artificial Sequence
  spacer sequence CTCN PAM
cacggucucuaggccugacc

SEQ ID NO: 33262 - RNA, 20 nt, Artificial Sequence
  spacer sequence CTCN PAM
aggccugaccucaacgcucc

SEQ ID NO: 33263 - RNA, 20 nt, Artificial Sequence
  spacer sequence CTCN PAM
acgcucccuggccugauugc

SEQ ID NO: 33264 - RNA, 20 nt, Artificial Sequence
  spacer sequence CTCN PAM
cuggccugauugcgaagggu

SEQ ID NO: 33265 - RNA, 20 nt, Artificial Sequence
  spacer sequence CTCN PAM
cacgcacccuucgcaaucag

SEQ ID NO: 33266 - RNA, 20 nt, Artificial Sequence
  spacer sequence CTCN PAM
uuaacuuaaaauccuacguc

SEQ ID NO: 33267 - RNA, 20 nt, Artificial Sequence
  spacer sequence CTCN PAM
accuaagccuguugcuguug

SEQ ID NO: 33268 - RNA, 20 nt, Artificial Sequence
  spacer sequence CTCN PAM
ucucuaagggucaggaagca

SEQ ID NO: 33269 - RNA, 20 nt, Artificial Sequence
  spacer sequence CTCN PAM
aagggucaggaagcacaggg

SEQ ID NO: 33270 - RNA, 20 nt, Artificial Sequence
  spacer sequence CTCN PAM
aauucuucccgccucagccc

SEQ ID NO: 33271 - RNA, 20 nt, Artificial Sequence
  spacer sequence CTCN PAM
gcccuccccaccgaagaacg

SEQ ID NO: 33272 - RNA, 20 nt, Artificial Sequence
  spacer sequence CTCN PAM
ccaccgaagaacggggcugg

SEQ ID NO: 33273 - RNA, 20 nt, Artificial Sequence
  spacer sequence CTCN PAM
uggcgguuggcuguggcaga

SEQ ID NO: 33274 - RNA, 20 nt, Artificial Sequence
  spacer sequence CTCN PAM
cgggggcugaguguacaggc

SEQ ID NO: 33275 - RNA, 20 nt, Artificial Sequence
  spacer sequence CTCN PAM
gcccccgcgagucagccccu

SEQ ID NO: 33276 - RNA, 20 nt, Artificial Sequence
  spacer sequence CTCN PAM
ucaaccaccaccuggggccu

SEQ ID NO: 33277 - RNA, 20 nt, Artificial Sequence
  spacer sequence CTCN PAM
caucaaccaccaccuggggc

SEQ ID NO: 33278 - RNA, 20 nt, Artificial Sequence
  spacer sequence CTCN PAM
ucaccucucaucaaccacca

SEQ ID NO: 33279 - RNA, 20 nt, Artificial Sequence
  spacer sequence CTCN PAM
ccaggaaagaccccugcaag

SEQ ID NO: 33280 - RNA, 20 nt, Artificial Sequence
  spacer sequence CTCN PAM
ugccagcucgccaggaaaga

SEQ ID NO: 33281 - RNA, 20 nt, Artificial Sequence
  spacer sequence CTCN PAM
cugcuccugccagcucgcca

SEQ ID NO: 33282 - RNA, 20 nt, Artificial Sequence
  spacer sequence CTCN PAM
ucccugcuccugccagcucg

SEQ ID NO: 33283 - RNA, 20 nt, Artificial Sequence
  spacer sequence CTCN PAM
ugcugcugguggggcaguaa

SEQ ID NO: 33284 - RNA, 20 nt, Artificial Sequence
  spacer sequence CTCN PAM
cugaaagcaccauucccacg

SEQ ID NO: 33285 - RNA, 20 nt, Artificial Sequence
  spacer sequence CTCN PAM
ggugggagcuuuggccugca

SEQ ID NO: 33286 - RNA, 20 nt, Artificial Sequence
  spacer sequence CTCN PAM
caccugagccgcaagaaucc

SEQ ID NO: 33287 - RNA, 20 nt, Artificial Sequence
  spacer sequence CTCN PAM
cuggagaccaagggugauga

SEQ ID NO: 33288 - RNA, 20 nt, Artificial Sequence
  spacer sequence CTCN PAM
ggagaccaagggugaugaug

SEQ ID NO: 33289 - RNA, 20 nt, Artificial Sequence
  spacer sequence CTCN PAM
agagagcaaaacaccgugca

SEQ ID NO: 33290 - RNA, 20 nt, Artificial Sequence
  spacer sequence CTCN PAM
gugccagcaccaucaucacc

SEQ ID NO: 33291 - RNA, 20 nt, Artificial Sequence
  spacer sequence CTCN PAM
gcugugacucagugccagca

SEQ ID NO: 33292 - RNA, 20 nt, Artificial Sequence
  spacer sequence CTCN PAM
gggacuucauuucugaaugc

SEQ ID NO: 33293 - RNA, 20 nt, Artificial Sequence
  spacer sequence CTCN PAM
uucccagggaaagcaggcag

SEQ ID NO: 33294 - RNA, 20 nt, Artificial Sequence
  spacer sequence CTCN PAM
cauccugccugcuuucccug

SEQ ID NO: 33295 - RNA, 20 nt, Artificial Sequence
  spacer sequence CTCN PAM
cccauccugccugcuuuccc

SEQ ID NO: 33296 - RNA, 20 nt, Artificial Sequence
  spacer sequence CTCN PAM
ucccugccuccugggcuugg

SEQ ID NO: 33297 - RNA, 20 nt, Artificial Sequence
  spacer sequence CTCN PAM
ugggcuugggggaagcuuga

SEQ ID NO: 33298 - RNA, 20 nt, Artificial Sequence
  spacer sequence CTCN PAM
gacaugcccagugggugcca

SEQ ID NO: 33299 - RNA, 20 nt, Artificial Sequence
  spacer sequence CTCN PAM
agguggcacaguccccauug

SEQ ID NO: 33300 - RNA, 20 nt, Artificial Sequence
  spacer sequence CTCN PAM
caauggggacugugccaccu

SEQ ID NO: 33301 - RNA, 20 nt, Artificial Sequence
  spacer sequence CTCN PAM
caauggggacugugccaacu

SEQ ID NO: 33302 - RNA, 20 nt, Artificial Sequence
  spacer sequence CTCN PAM
agguggccccagggccuugg

SEQ ID NO: 33303 - RNA, 20 nt, Artificial Sequence
  spacer sequence CTCN PAM
cugccgcuccagguggcccc

SEQ ID NO: 33304 - RNA, 20 nt, Artificial Sequence
  spacer sequence CTCN PAM
ccuuuccaccucacugccgc

SEQ ID NO: 33305 - RNA, 20 nt, Artificial Sequence
  spacer sequence CTCN PAM
caaggcguccgccaucgacc

SEQ ID NO: 33306 - RNA, 20 nt, Artificial Sequence
  spacer sequence CTCN PAM
cccaaggcguccgccaucga

SEQ ID NO: 33307 - RNA, 20 nt, Artificial Sequence
  spacer sequence CTCN PAM
agcucuucugcccggaggag

SEQ ID NO: 33308 - RNA, 20 nt, Artificial Sequence
  spacer sequence CTCN PAM
ucugcccggaggagacagcc

SEQ ID NO: 33309 - RNA, 20 nt, Artificial Sequence
  spacer sequence CTCN PAM
gggcagaagagcuggagcuc

SEQ ID NO: 33310 - RNA, 20 nt, Artificial Sequence
  spacer sequence CTCN PAM
uccgggcagaagagcuggag

SEQ ID NO: 33311 - RNA, 20 nt, Artificial Sequence
  spacer sequence CTCN PAM
gcacuggcacuuccugccug

SEQ ID NO: 33312 - RNA, 20 nt, Artificial Sequence
  spacer sequence CTCN PAM
ucugccaauaagagacagcc

SEQ ID NO: 33313 - RNA, 20 nt, Artificial Sequence
  spacer sequence CTCN PAM
uauuggcagaugagaagggc

SEQ ID NO: 33314 - RNA, 20 nt, Artificial Sequence
  spacer sequence CTCN PAM
gcacuggccccacuuacuua

SEQ ID NO: 33315 - RNA, 20 nt, Artificial Sequence
  spacer sequence CTCN PAM
agucucagcacuggccccac

SEQ ID NO: 33316 - RNA, 20 nt, Artificial Sequence
  spacer sequence CTCN PAM
cguuaguucgugagugcagg

SEQ ID NO: 33317 - RNA, 20 nt, Artificial Sequence
  spacer sequence CTCN PAM
uuaguucgugagugcaggcu

SEQ ID NO: 33318 - RNA, 20 nt, Artificial Sequence
  spacer sequence CTCN PAM
cgaacuaacgagaggcccac

SEQ ID NO: 33319 - RNA, 20 nt, Artificial Sequence
  spacer sequence CTCN PAM
uugggaggcuucugucugug

SEQ ID NO: 33320 - RNA, 20 nt, Artificial Sequence
  spacer sequence CTCN PAM
caaugagccugcacucacga

SEQ ID NO: 33321 - RNA, 20 nt, Artificial Sequence
  spacer sequence CTCN PAM
gaauuacagccuggggcggg

SEQ ID NO: 33322 - RNA, 20 nt, Artificial Sequence
  spacer sequence CTCN PAM
caaaagcuguaggaaagcga

SEQ ID NO: 33323 - RNA, 20 nt, Artificial Sequence
  spacer sequence CTCN PAM
cuuuccuacagcuuuugcga

SEQ ID NO: 33324 - RNA, 20 nt, Artificial Sequence
  spacer sequence CTCN PAM
ccugcacugcugccaagugg

SEQ ID NO: 33325 - RNA, 20 nt, Artificial Sequence
  spacer sequence CTCN PAM
ucgcccgccacgcaugaggu

SEQ ID NO: 33326 - RNA, 20 nt, Artificial Sequence
  spacer sequence CTCN PAM
ugcguggcgggcgaugaguu

SEQ ID NO: 33327 - RNA, 20 nt, Artificial Sequence
  spacer sequence CTCN PAM
guggcacgguccucucccca

SEQ ID NO: 33328 - RNA, 20 nt, Artificial Sequence
  spacer sequence CTCN PAM
ccccauggcaaggauuggga

SEQ ID NO: 33329 - RNA, 20 nt, Artificial Sequence
  spacer sequence CTCN PAM
ccauggcaaggauugggauc

SEQ ID NO: 33330 - RNA, 20 nt, Artificial Sequence
  spacer sequence CTCN PAM
cccaugcugucugcagacau

SEQ ID NO: 33331 - RNA, 20 nt, Artificial Sequence
  spacer sequence CTCN PAM
ccauugcugugagcuuugua

SEQ ID NO: 33332 - RNA, 20 nt, Artificial Sequence
  spacer sequence CTCN PAM
cagcaauggcgagucagccu

SEQ ID NO: 33333 - RNA, 20 nt, Artificial Sequence
  spacer sequence CTCN PAM
gcuuggcuuggaugggggca

SEQ ID NO: 33334 - RNA, 20 nt, Artificial Sequence
  spacer sequence CTCN PAM
ccuuagaaaugcccccaucc

SEQ ID NO: 33335 - RNA, 20 nt, Artificial Sequence
  spacer sequence CTCN PAM
uugaaucgcaggaagcucuu

SEQ ID NO: 33336 - RNA, 20 nt, Artificial Sequence
  spacer sequence CTCN PAM
ucgugggcggucuugacugg

SEQ ID NO: 33337 - RNA, 20 nt, Artificial Sequence
  spacer sequence CTCN PAM
agucaagaccgcccacgaag

SEQ ID NO: 33338 - RNA, 20 nt, Artificial Sequence
  spacer sequence CTCN PAM
aggaccucggccuucaaguu

SEQ ID NO: 33339 - RNA, 20 nt, Artificial Sequence
  spacer sequence CTCN PAM
gccuucaaguugugucugcc

SEQ ID NO: 33340 - RNA, 20 nt, Artificial Sequence
  spacer sequence CTCN PAM
ugcuacugucuuggauauuu

SEQ ID NO: 33341 - RNA, 20 nt, Artificial Sequence
  spacer sequence CTCN PAM
guccccugcccagaaaucag

SEQ ID NO: 33342 - RNA, 20 nt, Artificial Sequence
  spacer sequence CTCN PAM
gagacuguuaauuugguauu

SEQ ID NO: 33343 - RNA, 20 nt, Artificial Sequence
  spacer sequence CTCN PAM
gagcaaauacacacuuacuc

SEQ ID NO: 33344 - RNA, 20 nt, Artificial Sequence
  spacer sequence CTCN PAM
ggcugcagguuccuagcucc

SEQ ID NO: 33345 - RNA, 20 nt, Artificial Sequence
  spacer sequence CTCN PAM
gggcugagguggcuugugga

SEQ ID NO: 33346 - RNA, 20 nt, Artificial Sequence
  spacer sequence CTCN PAM
gcccggagcuaggaaccugc

SEQ ID NO: 33347 - RNA, 20 nt, Artificial Sequence
  spacer sequence CTCN PAM
acaagccaccucagcccgga

SEQ ID NO: 33348 - RNA, 20 nt, Artificial Sequence
  spacer sequence CTCN PAM
gcacuuccagacaacagcug

SEQ ID NO: 33349 - RNA, 20 nt, Artificial Sequence
  spacer sequence CTCN PAM
guaacagccuggccagcccc

SEQ ID NO: 33350 - RNA, 20 nt, Artificial Sequence
  spacer sequence CTCN PAM
uauucugaacucaguaacag

SEQ ID NO: 33351 - RNA, 20 nt, Artificial Sequence
  spacer sequence CTCN PAM
uuccuccuauucugaacuca

SEQ ID NO: 33352 - RNA, 20 nt, Artificial Sequence
  spacer sequence CTCN PAM
uuggccacugccagcauuca

SEQ ID NO: 33353 - RNA, 20 nt, Artificial Sequence
  spacer sequence CTCN PAM
gaaugcuggcaguggccaag

SEQ ID NO: 33354 - RNA, 20 nt, Artificial Sequence
  spacer sequence CTCN PAM
cuggcagccccugauuuacg

SEQ ID NO: 33355 - RNA, 20 nt, Artificial Sequence
  spacer sequence CTCN PAM
cguaaaucaggggcugccag

SEQ ID NO: 33356 - RNA, 20 nt, Artificial Sequence
  spacer sequence CTCN PAM
aguguguguugggcagaauu

SEQ ID NO: 33357 - RNA, 20 nt, Artificial Sequence
  spacer sequence CTCN PAM
gugcguggcugguggacugg

SEQ ID NO: 33358 - RNA, 20 nt, Artificial Sequence
  spacer sequence CTCN PAM
aguccaccagccacgcaccg

SEQ ID NO: 33359 - RNA, 20 nt, Artificial Sequence
  spacer sequence CTCN PAM
uccaguccaccagccacgca

SEQ ID NO: 33360 - RNA, 20 nt, Artificial Sequence
  spacer sequence CTCN PAM
ggcccuguguguuuguguuu

SEQ ID NO: 33361 - RNA, 20 nt, Artificial Sequence
  spacer sequence CTCN PAM
gaaaucgggaagaaaacaca

SEQ ID NO: 33362 - RNA, 20 nt, Artificial Sequence
  spacer sequence CTCN PAM
gcucagaaaucgggaagaaa

SEQ ID NO: 33363 - RNA, 20 nt, Artificial Sequence
  spacer sequence CTCN PAM
gcgcagcuacuuuucccaau

SEQ ID NO: 33364 - RNA, 20 nt, Artificial Sequence
  spacer sequence CTCN PAM
auauugggaaaaguagcugc

SEQ ID NO: 33365 - RNA, 20 nt, Artificial Sequence
  spacer sequence CTCN PAM
aggcuuuggguuugucaaau

SEQ ID NO: 33366 - RNA, 20 nt, Artificial Sequence
  spacer sequence CTCN PAM
agacugguuggugguuuuau

SEQ ID NO: 33367 - RNA, 20 nt, Artificial Sequence
  spacer sequence CTCN PAM
cggaagggcacuuacguuuc

SEQ ID NO: 33368 - RNA, 20 nt, Artificial Sequence
  spacer sequence CTCN PAM
cacccgcucucugucucccc

SEQ ID NO: 33369 - RNA, 20 nt, Artificial Sequence
  spacer sequence CTCN PAM
cugucuccccuguccuuccu

SEQ ID NO: 33370 - RNA, 20 nt, Artificial Sequence
  spacer sequence CTCN PAM
gucuccccuguccuuccucu

SEQ ID NO: 33371 - RNA, 20 nt, Artificial Sequence
  spacer sequence CTCN PAM
ccuguccuuccucugcuuca

SEQ ID NO: 33372 - RNA, 20 nt, Artificial Sequence
  spacer sequence CTCN PAM
gcuucauuuuuuccuggacu

SEQ ID NO: 33373 - RNA, 20 nt, Artificial Sequence
  spacer sequence CTCN PAM
gaccgauguuugcguuagag

SEQ ID NO: 33374 - RNA, 20 nt, Artificial Sequence
  spacer sequence CTCN PAM
aacgcaaacaucggucagag

SEQ ID NO: 33375 - RNA, 20 nt, Artificial Sequence
  spacer sequence CTCN PAM
gcaccaaggcuuaauccuuc

SEQ ID NO: 33376 - RNA, 20 nt, Artificial Sequence
  spacer sequence CTCN PAM
ugcaauauccagccucagca

SEQ ID NO: 33377 - RNA, 20 nt, Artificial Sequence
  spacer sequence CTCN PAM
auucacccuguauccuccug

SEQ ID NO: 33378 - RNA, 20 nt, Artificial Sequence
  spacer sequence CTCN PAM
uuccuagagaaacagccucu

SEQ ID NO: 33379 - RNA, 20 nt, Artificial Sequence
  spacer sequence CTCN PAM
aggaaagagggugucagcac

SEQ ID NO: 33380 - RNA, 20 nt, Artificial Sequence
  spacer sequence CTCN PAM
uauucacaaccagcugauuu

SEQ ID NO: 33381 - RNA, 20 nt, Artificial Sequence
  spacer sequence CTCN PAM
ggcugcaucccccggggugu

SEQ ID NO: 33382 - RNA, 20 nt, Artificial Sequence
  spacer sequence CTCN PAM
ccggcugcaucccccggggu

SEQ ID NO: 33383 - RNA, 20 nt, Artificial Sequence
  spacer sequence CTCN PAM
uuguguguucuccacuccac

SEQ ID NO: 33384 - RNA, 20 nt, Artificial Sequence
  spacer sequence CTCN PAM
acuccacguggaaaggaaau

SEQ ID NO: 33385 - RNA, 20 nt, Artificial Sequence
  spacer sequence CTCN PAM
acguggaaaggaaaugcgug

SEQ ID NO: 33386 - RNA, 20 nt, Artificial Sequence
  spacer sequence CTCN PAM
uuaagauugagggcgacgca

SEQ ID NO: 33387 - RNA, 20 nt, Artificial Sequence
  spacer sequence CTCN PAM
aucuuaacgagcgacaacag

SEQ ID NO: 33388 - RNA, 20 nt, Artificial Sequence
  spacer sequence CTCN PAM
agcagcugaggaucacccag

SEQ ID NO: 33389 - RNA, 20 nt, Artificial Sequence
  spacer sequence CTCN PAM
agugccaacccagaagaccu

SEQ ID NO: 33390 - RNA, 20 nt, Artificial Sequence
  spacer sequence CTCN PAM
gcugcucgagugccaaccca

SEQ ID NO: 33391 - RNA, 20 nt, Artificial Sequence
  spacer sequence CTCN PAM
cggcacugauaaaucugggu

SEQ ID NO: 33392 - RNA, 20 nt, Artificial Sequence
  spacer sequence CTCN PAM
ugccacugauuaucaggagc

SEQ ID NO: 33393 - RNA, 20 nt, Artificial Sequence
  spacer sequence CTCN PAM
ugauaaucaguggcaugagc

SEQ ID NO: 33394 - RNA, 20 nt, Artificial Sequence
  spacer sequence CTCN PAM
gugcccugugugcccucugu

SEQ ID NO: 33395 - RNA, 20 nt, Artificial Sequence
  spacer sequence CTCN PAM
gugccgggccugcccccucc

SEQ ID NO: 33396 - RNA, 20 nt, Artificial Sequence
  spacer sequence CTCN PAM
cacugccuggcccuccucag

SEQ ID NO: 33397 - RNA, 20 nt, Artificial Sequence
  spacer sequence CTCN PAM
ucagaggugggccauccuuc

SEQ ID NO: 33398 - RNA, 20 nt, Artificial Sequence
  spacer sequence CTCN PAM
gaggugggccauccuuccac

SEQ ID NO: 33399 - RNA, 20 nt, Artificial Sequence
  spacer sequence CTCN PAM
gaggagggccaggcaguggg

SEQ ID NO: 33400 - RNA, 20 nt, Artificial Sequence
  spacer sequence CTCN PAM
ugcuggccacuuuacugcuc

SEQ ID NO: 33401 - RNA, 20 nt, Artificial Sequence
  spacer sequence CTCN PAM
acuugagauccccugacgug

SEQ ID NO: 33402 - RNA, 20 nt, Artificial Sequence
  spacer sequence CTCN PAM
aguggagcaguaaaguggcc

SEQ ID NO: 33403 - RNA, 20 nt, Artificial Sequence
  spacer sequence CTCN PAM
gaccugcgcccuggugcuug

SEQ ID NO: 33404 - RNA, 20 nt, Artificial Sequence
  spacer sequence CTCN PAM
uuggcauuugggucucacca

SEQ ID NO: 33405 - RNA, 20 nt, Artificial Sequence
  spacer sequence CTCN PAM
ccaccacccacaccucaccu

SEQ ID NO: 33406 - RNA, 20 nt, Artificial Sequence
  spacer sequence CTCN PAM
ccuuccuccagcccugcagu

SEQ ID NO: 33407 - RNA, 20 nt, Artificial Sequence
  spacer sequence CTCN PAM
agcccugcaguucucacacc

SEQ ID NO: 33408 - RNA, 20 nt, Artificial Sequence
  spacer sequence CTCN PAM
caccggcaccaggagccugg

SEQ ID NO: 33409 - RNA, 20 nt, Artificial Sequence
  spacer sequence CTCN PAM
uggugccggugugagaacug

SEQ ID NO: 33410 - RNA, 20 nt, Artificial Sequence
  spacer sequence CTCN PAM
uagccccauagaacgugcug

SEQ ID NO: 33411 - RNA, 20 nt, Artificial Sequence
  spacer sequence CTCN PAM
aggucugcacuguccagcac

SEQ ID NO: 33412 - RNA, 20 nt, Artificial Sequence
  spacer sequence CTCN PAM
gcaggccuccaggucugcac

SEQ ID NO: 33413 - RNA, 20 nt, Artificial Sequence
  spacer sequence CTCN PAM
ccacagugugggcagcaggg

SEQ ID NO: 33414 - RNA, 20 nt, Artificial Sequence
  spacer sequence CTCN PAM
acagugugggcagcagggug

SEQ ID NO: 33415 - RNA, 20 nt, Artificial Sequence
  spacer sequence CTCN PAM
guccacauacaccauuccua

SEQ ID NO: 33416 - RNA, 20 nt, Artificial Sequence
  spacer sequence CTCN PAM
gguccuuaggaaugguguau

SEQ ID NO: 33417 - RNA, 20 nt, Artificial Sequence
  spacer sequence CTCN PAM
uaaaaugacggccaccccuc

SEQ ID NO: 33418 - RNA, 20 nt, Artificial Sequence
  spacer sequence CTCN PAM
caugcacccaccgucagcac

SEQ ID NO: 33419 - RNA, 20 nt, Artificial Sequence
  spacer sequence CTCN PAM
agaauuguuucacaaguguc

SEQ ID NO: 33420 - RNA, 20 nt, Artificial Sequence
  spacer sequence CTCN PAM
cauagcugguuuuuuucaga

SEQ ID NO: 33421 - RNA, 20 nt, Artificial Sequence
  spacer sequence CTCN PAM
uagcugguuuuuuucagacu

SEQ ID NO: 33422 - RNA, 20 nt, Artificial Sequence
  spacer sequence CTCN PAM
gccacuccagccccaagaag

SEQ ID NO: 33423 - RNA, 20 nt, Artificial Sequence
  spacer sequence CTCN PAM
cagccugaaaggcccgugca

SEQ ID NO: 33424 - RNA, 20 nt, Artificial Sequence
  spacer sequence CTCN PAM
cugucucguauuuccccaac

SEQ ID NO: 33425 - RNA, 20 nt, Artificial Sequence
  spacer sequence CTCN PAM
uauuuccccaacgccugcgc

SEQ ID NO: 33426 - RNA, 20 nt, Artificial Sequence
  spacer sequence CTCN PAM
ggaaagguggaaagcccggc

SEQ ID NO: 33427 - RNA, 20 nt, Artificial Sequence
  spacer sequence CTCN PAM
gacacuggaccccacggugu

SEQ ID NO: 33428 - RNA, 20 nt, Artificial Sequence
  spacer sequence CTCN PAM
cccaggccacacugaacccc

SEQ ID NO: 33429 - RNA, 20 nt, Artificial Sequence
  spacer sequence CTCN PAM
guggggcuggcucgcccagg

SEQ ID NO: 33430 - RNA, 20 nt, Artificial Sequence
  spacer sequence CTCN PAM
caccugcccaguggaaaguc

SEQ ID NO: 33431 - RNA, 20 nt, Artificial Sequence
  spacer sequence CTCN PAM
ggcauucucccaccugccca

SEQ ID NO: 33432 - RNA, 20 nt, Artificial Sequence
  spacer sequence CTCN PAM
guugagcccagugccagagg

SEQ ID NO: 33433 - RNA, 20 nt, Artificial Sequence
  spacer sequence CTCN PAM
acggagcucgggcauucucc

SEQ ID NO: 33434 - RNA, 20 nt, Artificial Sequence
  spacer sequence CTCN PAM
ggcacugggcucaacggagc

SEQ ID NO: 33435 - RNA, 20 nt, Artificial Sequence
  spacer sequence CTCN PAM
cucuggcacugggcucaacg

SEQ ID NO: 33436 - RNA, 20 nt, Artificial Sequence
  spacer sequence CTCN PAM
ggcugucccagcucccucug

SEQ ID NO: 33437 - RNA, 20 nt, Artificial Sequence
  spacer sequence CTCN PAM
ccgccggcccccuccggcug

SEQ ID NO: 33438 - RNA, 20 nt, Artificial Sequence
  spacer sequence CTCN PAM
uagucacccaaggcaggggc

SEQ ID NO: 33439 - RNA, 20 nt, Artificial Sequence
  spacer sequence CTCN PAM
ugccgugccccgcaggucac

SEQ ID NO: 33440 - RNA, 20 nt, Artificial Sequence
  spacer sequence CTCN PAM
gagccccgccagcaggacag

SEQ ID NO: 33441 - RNA, 20 nt, Artificial Sequence
  spacer sequence CTCN PAM
gagugugaccugcggggcac

SEQ ID NO: 33442 - RNA, 20 nt, Artificial Sequence
  spacer sequence CTCN PAM
ggcacgcagggcuguccugc

SEQ ID NO: 33443 - RNA, 20 nt, Artificial Sequence
  spacer sequence CTCN PAM
gguaccaccugaugaacgug

SEQ ID NO: 33444 - RNA, 20 nt, Artificial Sequence
  spacer sequence CTCN PAM
uuccuggcccaggcccgugg

SEQ ID NO: 33445 - RNA, 20 nt, Artificial Sequence
  spacer sequence CTCN PAM
cauuccuggcccaggcccgu

SEQ ID NO: 33446 - RNA, 20 nt, Artificial Sequence
  spacer sequence CTCN PAM
ggccucucauuccuggccca

SEQ ID NO: 33447 - RNA, 20 nt, Artificial Sequence
  spacer sequence CTCN PAM
uccaggccccgcucaggccu

SEQ ID NO: 33448 - RNA, 20 nt, Artificial Sequence
  spacer sequence CTCN PAM
gcagacccugcucuuccagg

SEQ ID NO: 33449 - RNA, 20 nt, Artificial Sequence
  spacer sequence CTCN PAM
ucugcagacccugcucuucc

SEQ ID NO: 33450 - RNA, 20 nt, Artificial Sequence
  spacer sequence CTCN PAM
aaguggcggggcagccacac

SEQ ID NO: 33451 - RNA, 20 nt, Artificial Sequence
  spacer sequence CTCN PAM
cucgaaguggcggggcagcc

SEQ ID NO: 33452 - RNA, 20 nt, Artificial Sequence
  spacer sequence CTCN PAM
gcccucacucgaaguggcgg

SEQ ID NO: 33453 - RNA, 20 nt, Artificial Sequence
  spacer sequence CTCN PAM
uggcucccacguccccugcu

SEQ ID NO: 33454 - RNA, 20 nt, Artificial Sequence
  spacer sequence CTCN PAM
cacguccccugcuaggaugc

SEQ ID NO: 33455 - RNA, 20 nt, Artificial Sequence
  spacer sequence CTCN PAM
cgugugugcugacggacaug

SEQ ID NO: 33456 - RNA, 20 nt, Artificial Sequence
  spacer sequence CTCN PAM
gggcugcccguggccccgcu

SEQ ID NO: 33457 - RNA, 20 nt, Artificial Sequence
  spacer sequence CTCN PAM
agggcaggcgucuggauacc

SEQ ID NO: 33458 - RNA, 20 nt, Artificial Sequence
  spacer sequence CTCN PAM
cugccugcgucuggcccugg

SEQ ID NO: 33459 - RNA, 20 nt, Artificial Sequence
  spacer sequence CTCN PAM
cagggccagacgcaggcagg

SEQ ID NO: 33460 - RNA, 20 nt, Artificial Sequence
  spacer sequence CTCN PAM
agccuuucucagacagcagc

SEQ ID NO: 33461 - RNA, 20 nt, Artificial Sequence
  spacer sequence CTCN PAM
gacagcagccccacggagca

SEQ ID NO: 33462 - RNA, 20 nt, Artificial Sequence
  spacer sequence CTCN PAM
guggggcugcugucugagaa

SEQ ID NO: 33463 - RNA, 20 nt, Artificial Sequence
  spacer sequence CTCN PAM
cccgcucagggagggcgcac

SEQ ID NO: 33464 - RNA, 20 nt, Artificial Sequence
  spacer sequence CTCN PAM
gggagggcgcacccugugcg

SEQ ID NO: 33465 - RNA, 20 nt, Artificial Sequence
  spacer sequence CTCN PAM
cugagcgggggaggugcacg

SEQ ID NO: 33466 - RNA, 20 nt, Artificial Sequence
  spacer sequence CTCN PAM
cacagggugcgcccucccug

SEQ ID NO: 33467 - RNA, 20 nt, Artificial Sequence
  spacer sequence CTCN PAM
cgcacagggugcgcccuccc

SEQ ID NO: 33468 - RNA, 20 nt, Artificial Sequence
  spacer sequence CTCN PAM
gaagaccaccuguggugcug

SEQ ID NO: 33469 - RNA, 20 nt, Artificial Sequence
  spacer sequence CTCN PAM
ccuuccaggucacggaggua

SEQ ID NO: 33470 - RNA, 20 nt, Artificial Sequence
  spacer sequence CTCN PAM
uuccaggucacggagguagu

SEQ ID NO: 33471 - RNA, 20 nt, Artificial Sequence
  spacer sequence CTCN PAM
gugaccuggaaggagagggu

SEQ ID NO: 33472 - RNA, 20 nt, Artificial Sequence
  spacer sequence CTCN PAM
gcgucauagaucaugacuac

SEQ ID NO: 33473 - RNA, 20 nt, Artificial Sequence
  spacer sequence CTCN PAM
gcuucucggcgucauagauc

SEQ ID NO: 33474 - RNA, 20 nt, Artificial Sequence
  spacer sequence CTCN PAM
gggccucugcuucucggcgu

SEQ ID NO: 33475 - RNA, 20 nt, Artificial Sequence
  spacer sequence CTCN PAM
gccuucucccugcuccuccc

SEQ ID NO: 33476 - RNA, 20 nt, Artificial Sequence
  spacer sequence CTCN PAM
cugcuccucccucagauggc

SEQ ID NO: 33477 - RNA, 20 nt, Artificial Sequence
  spacer sequence CTCN PAM
ucccucagauggcaaacuau

SEQ ID NO: 33478 - RNA, 20 nt, Artificial Sequence
  spacer sequence CTCN PAM
cucagauggcaaacuaucuc

SEQ ID NO: 33479 - RNA, 20 nt, Artificial Sequence
  spacer sequence CTCN PAM
gauggcaaacuaucucaccc

SEQ ID NO: 33480 - RNA, 20 nt, Artificial Sequence
  spacer sequence CTCN PAM
cccgccaggcacacacaggu

SEQ ID NO: 33481 - RNA, 20 nt, Artificial Sequence
  spacer sequence CTCN PAM
ggaagggacgauuuggagac

SEQ ID NO: 33482 - RNA, 20 nt, Artificial Sequence
  spacer sequence CTCN PAM
aaaucgucccuuccugaggc

SEQ ID NO: 33483 - RNA, 20 nt, Artificial Sequence
  spacer sequence CTCN PAM
ucaugugcaccccauucagc

SEQ ID NO: 33484 - RNA, 20 nt, Artificial Sequence
  spacer sequence CTCN PAM
ugugcaccccauucagccug

SEQ ID NO: 33485 - RNA, 20 nt, Artificial Sequence
  spacer sequence CTCN PAM
ggaagcacagacaggcugaa

SEQ ID NO: 33486 - RNA, 20 nt, Artificial Sequence
  spacer sequence CTCN PAM
ugacaagucguaaaaacuuc

SEQ ID NO: 33487 - RNA, 20 nt, Artificial Sequence
  spacer sequence CTCN PAM
gccuggcuucuguuuuucac

SEQ ID NO: 33488 - RNA, 20 nt, Artificial Sequence
  spacer sequence CTCN PAM
uccggacagugaaaaacaga

SEQ ID NO: 33489 - RNA, 20 nt, Artificial Sequence
  spacer sequence CTCN PAM
uccaguccucccaguguggc

SEQ ID NO: 33490 - RNA, 20 nt, Artificial Sequence
  spacer sequence CTCN PAM
caguguggccggucucauuu

SEQ ID NO: 33491 - RNA, 20 nt, Artificial Sequence
  spacer sequence CTCN PAM
uuucgugucgucagcugggu

SEQ ID NO: 33492 - RNA, 20 nt, Artificial Sequence
  spacer sequence CTCN PAM
guguggaguuuggauuuucc

SEQ ID NO: 33493 - RNA, 20 nt, Artificial Sequence
  spacer sequence CTCN PAM
acaccgagccagcugaccca

SEQ ID NO: 33494 - RNA, 20 nt, Artificial Sequence
  spacer sequence CTCN PAM
ccucucugaagucagcaggg

SEQ ID NO: 33495 - RNA, 20 nt, Artificial Sequence
  spacer sequence CTCN PAM
cugaagucagcagggcaggu

SEQ ID NO: 33496 - RNA, 20 nt, Artificial Sequence
  spacer sequence CTCN PAM
gaagucagcagggcaggugg

SEQ ID NO: 33497 - RNA, 20 nt, Artificial Sequence
  spacer sequence CTCN PAM
caccugcccugcugacuuca

SEQ ID NO: 33498 - RNA, 20 nt, Artificial Sequence
  spacer sequence CTCN PAM
ucccaccugcccugcugacu

SEQ ID NO: 33499 - RNA, 20 nt, Artificial Sequence
  spacer sequence CTCN PAM
ccccuccucccaccugcccu

SEQ ID NO: 33500 - RNA, 20 nt, Artificial Sequence
  spacer sequence CTCN PAM
ucaccccuccucccaccugc

SEQ ID NO: 33501 - RNA, 20 nt, Artificial Sequence
  spacer sequence CTCN PAM
gggccuccccucauuuuccc

SEQ ID NO: 33502 - RNA, 20 nt, Artificial Sequence
  spacer sequence CTCN PAM
ccucauuuucccucagcuuc

SEQ ID NO: 33503 - RNA, 20 nt, Artificial Sequence
  spacer sequence CTCN PAM
uuuucccucagcuucuugca

SEQ ID NO: 33504 - RNA, 20 nt, Artificial Sequence
  spacer sequence CTCN PAM
gcuucuugcacacccaucca

SEQ ID NO: 33505 - RNA, 20 nt, Artificial Sequence
  spacer sequence CTCN PAM
acaaaccagcauggaugggu

SEQ ID NO: 33506 - RNA, 20 nt, Artificial Sequence
  spacer sequence CTCN PAM
cguggccggccaaaagcagc

SEQ ID NO: 33507 - RNA, 20 nt, Artificial Sequence
  spacer sequence CTCN PAM
gggcugccccgacugaccug

SEQ ID NO: 33508 - RNA, 20 nt, Artificial Sequence
  spacer sequence CTCN PAM
agcauggugggcaugcugcg

SEQ ID NO: 33509 - RNA, 20 nt, Artificial Sequence
  spacer sequence CTCN PAM
cuccccacgguuaggagugc

SEQ ID NO: 33510 - RNA, 20 nt, Artificial Sequence
  spacer sequence CTCN PAM
ccacgguuaggagugcuccu

SEQ ID NO: 33511 - RNA, 20 nt, Artificial Sequence
  spacer sequence CTCN PAM
uaaccguggggagggagguu

SEQ ID NO: 33512 - RNA, 20 nt, Artificial Sequence
  spacer sequence CTCN PAM
uccuccaugucgguuacgcu

SEQ ID NO: 33513 - RNA, 20 nt, Artificial Sequence
  spacer sequence CTCN PAM
uccaugucgguuacgcuguu

SEQ ID NO: 33514 - RNA, 20 nt, Artificial Sequence
  spacer sequence CTCN PAM
augucgguuacgcuguuaag

SEQ ID NO: 33515 - RNA, 20 nt, Artificial Sequence
  spacer sequence CTCN PAM
cugugaauugugugugauua

SEQ ID NO: 33516 - RNA, 20 nt, Artificial Sequence
  spacer sequence CTCN PAM
gugaauugugugugauuaac

SEQ ID NO: 33517 - RNA, 20 nt, Artificial Sequence
  spacer sequence CTCN PAM
uuagauuucucuucuccagg

SEQ ID NO: 33518 - RNA, 20 nt, Artificial Sequence
  spacer sequence CTCN PAM
ucuccaggugcuaaauuaua

SEQ ID NO: 33519 - RNA, 20 nt, Artificial Sequence
  spacer sequence CTCN PAM
aggugcuaaauuauaucaca

SEQ ID NO: 33520 - RNA, 20 nt, Artificial Sequence
  spacer sequence CTCN PAM
gacugcgggacuggccugua

SEQ ID NO: 33521 - RNA, 20 nt, Artificial Sequence
  spacer sequence CTCN PAM
ucugacugcgggacuggccu

SEQ ID NO: 33522 - RNA, 20 nt, Artificial Sequence
  spacer sequence CTCN PAM
cuccucugacugcgggacug

SEQ ID NO: 33523 - RNA, 20 nt, Artificial Sequence
  spacer sequence CTCN PAM
agugggguguaaacgaaguu

SEQ ID NO: 33524 - RNA, 20 nt, Artificial Sequence
  spacer sequence CTCN PAM
guggugaugucgccucuuga

SEQ ID NO: 33525 - RNA, 20 nt, Artificial Sequence
  spacer sequence CTCN PAM
ugacagccgcauuccuagac

SEQ ID NO: 33526 - RNA, 20 nt, Artificial Sequence
  spacer sequence CTCN PAM
gggcgccucccccaggaccc

SEQ ID NO: 33527 - RNA, 20 nt, Artificial Sequence
  spacer sequence CTCN PAM
cccaggacccagcgccucuu

SEQ ID NO: 33528 - RNA, 20 nt, Artificial Sequence
  spacer sequence CTCN PAM
ugcacugugcccggaccagg

SEQ ID NO: 33529 - RNA, 20 nt, Artificial Sequence
  spacer sequence CTCN PAM
ccugguccgggcacagugca

SEQ ID NO: 33530 - RNA, 20 nt, Artificial Sequence
  spacer sequence CTCN PAM
ugcaguuugcgaaaaugucu

SEQ ID NO: 33531 - RNA, 20 nt, Artificial Sequence
  spacer sequence CTCN PAM
gaucuugggaaacuugagcg

SEQ ID NO: 33532 - RNA, 20 nt, Artificial Sequence
  spacer sequence CTCN PAM
aguuucccaagaucagaggc

SEQ ID NO: 33533 - RNA, 20 nt, Artificial Sequence
  spacer sequence CTCN PAM
gauucccgcgcgcucaaguu

SEQ ID NO: 33534 - RNA, 20 nt, Artificial Sequence
  spacer sequence CTCN PAM
cggucccccuccggcugccc

SEQ ID NO: 33535 - RNA, 20 nt, Artificial Sequence
  spacer sequence CTCN PAM
ggcugcccagagcuggcgcc

SEQ ID NO: 33536 - RNA, 20 nt, Artificial Sequence
  spacer sequence CTCN PAM
gggcagccggagggggaccg

SEQ ID NO: 33537 - RNA, 20 nt, Artificial Sequence
  spacer sequence CTCN PAM
ucgcguccuguccugucccg

SEQ ID NO: 33538 - RNA, 20 nt, Artificial Sequence
  spacer sequence CTCN PAM
cguccuguccugucccgugu

SEQ ID NO: 33539 - RNA, 20 nt, Artificial Sequence
  spacer sequence CTCN PAM
ccacgucccguccacacggg

SEQ ID NO: 33540 - RNA, 20 nt, Artificial Sequence
  spacer sequence CTCN PAM
gcgacacucgccacgucccg

SEQ ID NO: 33541 - RNA, 20 nt, Artificial Sequence
  spacer sequence CTCN PAM
guacaccaguguggacucag

SEQ ID NO: 33542 - RNA, 20 nt, Artificial Sequence
  spacer sequence CTCN PAM
ccugacacccaagggacacu

SEQ ID NO: 33543 - RNA, 20 nt, Artificial Sequence
  spacer sequence CTCN PAM
acucgccugacacccaaggg

SEQ ID NO: 33544 - RNA, 20 nt, Artificial Sequence
  spacer sequence CTCN PAM
ggcccuccacucgccugaca

SEQ ID NO: 33545 - RNA, 20 nt, Artificial Sequence
  spacer sequence CTCN PAM
ccggcccuccacucgccuga

SEQ ID NO: 33546 - RNA, 20 nt, Artificial Sequence
  spacer sequence CTCN PAM
cagagaguguguccccuucc

SEQ ID NO: 33547 - RNA, 20 nt, Artificial Sequence
  spacer sequence CTCN PAM
gggaggacccgcuaagcagc

SEQ ID NO: 33548 - RNA, 20 nt, Artificial Sequence
  spacer sequence CTCN PAM
cugggaggacccgcuaagca

SEQ ID NO: 33549 - RNA, 20 nt, Artificial Sequence
  spacer sequence CTCN PAM
gaagaugcagaaaggccaag

SEQ ID NO: 33550 - RNA, 20 nt, Artificial Sequence
  spacer sequence CTCN PAM
ccgccaccuccucccucuuc

SEQ ID NO: 33551 - RNA, 20 nt, Artificial Sequence
  spacer sequence CTCN PAM
ucccucuuccucuccacuga

SEQ ID NO: 33552 - RNA, 20 nt, Artificial Sequence
  spacer sequence CTCN PAM
cucuuccucuccacugacug

SEQ ID NO: 33553 - RNA, 20 nt, Artificial Sequence
  spacer sequence CTCN PAM
uccucuccacugacugaagg

SEQ ID NO: 33554 - RNA, 20 nt, Artificial Sequence
  spacer sequence CTCN PAM
ccacugacugaaggucaugg

SEQ ID NO: 33555 - RNA, 20 nt, Artificial Sequence
  spacer sequence CTCN PAM
acugacugaaggucauggcc

SEQ ID NO: 33556 - RNA, 20 nt, Artificial Sequence
  spacer sequence CTCN PAM
ggcacacagugucugugcgg

SEQ ID NO: 33557 - RNA, 20 nt, Artificial Sequence
  spacer sequence CTCN PAM
cacgucuacccucggcccgc

SEQ ID NO: 33558 - RNA, 20 nt, Artificial Sequence
  spacer sequence CTCN PAM
gcccgcccgcuccagccgcu

SEQ ID NO: 33559 - RNA, 20 nt, Artificial Sequence
  spacer sequence CTCN PAM
agccgcugccucguucgccu

SEQ ID NO: 33560 - RNA, 20 nt, Artificial Sequence
  spacer sequence CTCN PAM
uucgccucucaguccccuca

SEQ ID NO: 33561 - RNA, 20 nt, Artificial Sequence
  spacer sequence CTCN PAM
caguccccucaggucuucuc

SEQ ID NO: 33562 - RNA, 20 nt, Artificial Sequence
  spacer sequence CTCN PAM
guccccucaggucuucucca

SEQ ID NO: 33563 - RNA, 20 nt, Artificial Sequence
  spacer sequence CTCN PAM
ggucuucuccauccugcgcu

SEQ ID NO: 33564 - RNA, 20 nt, Artificial Sequence
  spacer sequence CTCN PAM
auccugcgcuccucucgcug

SEQ ID NO: 33565 - RNA, 20 nt, Artificial Sequence
  spacer sequence CTCN PAM
ucucgcugugugccuugccu

SEQ ID NO: 33566 - RNA, 20 nt, Artificial Sequence
  spacer sequence CTCN PAM
cgcugugugccuugccuucc

SEQ ID NO: 33567 - RNA, 20 nt, Artificial Sequence
  spacer sequence CTCN PAM
cugugugccuugccuuccug

SEQ ID NO: 33568 - RNA, 20 nt, Artificial Sequence
  spacer sequence CTCN PAM
uccucuuccuccuccucuuc

SEQ ID NO: 33569 - RNA, 20 nt, Artificial Sequence
  spacer sequence CTCN PAM
ucuuccuccuccucuucccc

SEQ ID NO: 33570 - RNA, 20 nt, Artificial Sequence
  spacer sequence CTCN PAM
uccuccuccucuucccccuc

SEQ ID NO: 33571 - RNA, 20 nt, Artificial Sequence
  spacer sequence CTCN PAM
uccucuucccccucccccuc

SEQ ID NO: 33572 - RNA, 20 nt, Artificial Sequence
  spacer sequence CTCN PAM
ucuucccccucccccuccuc

SEQ ID NO: 33573 - RNA, 20 nt, Artificial Sequence
  spacer sequence CTCN PAM
ucccccucccccuccuccuc

SEQ ID NO: 33574 - RNA, 20 nt, Artificial Sequence
  spacer sequence CTCN PAM
cccuccuccucccccucccc

SEQ ID NO: 33575 - RNA, 20 nt, Artificial Sequence
  spacer sequence CTCN PAM
uccucccccucccccucccc

SEQ ID NO: 33576 - RNA, 20 nt, Artificial Sequence
  spacer sequence CTCN PAM
ucccccucccccuccccccu

SEQ ID NO: 33577 - RNA, 20 nt, Artificial Sequence
  spacer sequence CTCN PAM
cccucccccuccccccuccc

SEQ ID NO: 33578 - RNA, 20 nt, Artificial Sequence
  spacer sequence CTCN PAM
cccuccccccucccccuccg

SEQ ID NO: 33579 - RNA, 20 nt, Artificial Sequence
  spacer sequence CTCN PAM
ccccucccccuccgucuggu

SEQ ID NO: 33580 - RNA, 20 nt, Artificial Sequence
  spacer sequence CTCN PAM
cccuccgucugguugcagac

SEQ ID NO: 33581 - RNA, 20 nt, Artificial Sequence
  spacer sequence CTCN PAM
gucugguugcagacacugcg

SEQ ID NO: 33582 - RNA, 20 nt, Artificial Sequence
  spacer sequence CTCN PAM
ggugcacacgugugcucagg

SEQ ID NO: 33583 - RNA, 20 nt, Artificial Sequence
  spacer sequence CTCN PAM
ggacggugggaggcuccuga

SEQ ID NO: 33584 - RNA, 20 nt, Artificial Sequence
  spacer sequence CTCN PAM
caccguccugagcacacgug

SEQ ID NO: 33585 - RNA, 20 nt, Artificial Sequence
  spacer sequence CTCN PAM
ugaaccacagugaccuuugu

SEQ ID NO: 33586 - RNA, 20 nt, Artificial Sequence
  spacer sequence CTCN PAM
cagucugagcugcccuuucu

SEQ ID NO: 33587 - RNA, 20 nt, Artificial Sequence
  spacer sequence CTCN PAM
gacugugaggggacaaaggu

SEQ ID NO: 33588 - RNA, 20 nt, Artificial Sequence
  spacer sequence CTCN PAM
ucagcuugagaggccccaca

SEQ ID NO: 33589 - RNA, 20 nt, Artificial Sequence
  spacer sequence CTCN PAM
agcugaagagacaggggcca

SEQ ID NO: 33590 - RNA, 20 nt, Artificial Sequence
  spacer sequence CTCN PAM
caagcugaagagacaggggc

SEQ ID NO: 33591 - RNA, 20 nt, Artificial Sequence
  spacer sequence CTCN PAM
uuccgggggccguugccugu

SEQ ID NO: 33592 - RNA, 20 nt, Artificial Sequence
  spacer sequence CTCN PAM
gccgcgcucguucacgccuc

SEQ ID NO: 33593 - RNA, 20 nt, Artificial Sequence
  spacer sequence CTCN PAM
uucacgccucacgcccgugc

SEQ ID NO: 33594 - RNA, 20 nt, Artificial Sequence
  spacer sequence CTCN PAM
cgcccgugcugcgcuguccc

SEQ ID NO: 33595 - RNA, 20 nt, Artificial Sequence
  spacer sequence CTCN PAM
ggcgcgggcagcccaucuuc

SEQ ID NO: 33596 - RNA, 20 nt, Artificial Sequence
  spacer sequence CTCN PAM
gcucuucccauguccaucuu

SEQ ID NO: 33597 - RNA, 20 nt, Artificial Sequence
  spacer sequence CTCN PAM
ucccauguccaucuuuguuc

SEQ ID NO: 33598 - RNA, 20 nt, Artificial Sequence
  spacer sequence CTCN PAM
cagaacaaagauggacaugg

SEQ ID NO: 33599 - RNA, 20 nt, Artificial Sequence
  spacer sequence CTCN PAM
ccagauggaagugcccggca

SEQ ID NO: 33600 - RNA, 20 nt, Artificial Sequence
  spacer sequence CTCN PAM
ggaggacggugugcuuugcg

SEQ ID NO: 33601 - RNA, 20 nt, Artificial Sequence
  spacer sequence CTCN PAM
cgaggcggggcccaggcggc

SEQ ID NO: 33602 - RNA, 20 nt, Artificial Sequence
  spacer sequence CTCN PAM
accuagccggggaggccugg

SEQ ID NO: 33603 - RNA, 20 nt, Artificial Sequence
  spacer sequence CTCN PAM
ccggcuagguggagcgugac

SEQ ID NO: 33604 - RNA, 20 nt, Artificial Sequence
  spacer sequence CTCN PAM
aggccuccccggcuaggugg

SEQ ID NO: 33605 - RNA, 20 nt, Artificial Sequence
  spacer sequence CTCN PAM
ccaggccuccccggcuaggu

SEQ ID NO: 33606 - RNA, 20 nt, Artificial Sequence
  spacer sequence CTCN PAM
ugcgccuagaggaggagacc

SEQ ID NO: 33607 - RNA, 20 nt, Artificial Sequence
  spacer sequence CTCN PAM
aggcgcaggagugcgccggg

SEQ ID NO: 33608 - RNA, 20 nt, Artificial Sequence
  spacer sequence CTCN PAM
ucuaggcgcaggagugcgcc

SEQ ID NO: 33609 - RNA, 20 nt, Artificial Sequence
  spacer sequence CTCN PAM
uccucuaggcgcaggagugc

SEQ ID NO: 33610 - RNA, 20 nt, Artificial Sequence
  spacer sequence CTCN PAM
uguguuugggaaaugcuaaa

SEQ ID NO: 33611 - RNA, 20 nt, Artificial Sequence
  spacer sequence CTCN PAM
cucuugcugcuggcagcaga

SEQ ID NO: 33612 - RNA, 20 nt, Artificial Sequence
  spacer sequence CTCN PAM
ugcugcuggcagcagagucu

SEQ ID NO: 33613 - RNA, 20 nt, Artificial Sequence
  spacer sequence CTCN PAM
gcugccagcagcaagagcga

SEQ ID NO: 33614 - RNA, 20 nt, Artificial Sequence
  spacer sequence CTCN PAM
accuguauagaacaugcaua

SEQ ID NO: 33615 - RNA, 20 nt, Artificial Sequence
  spacer sequence CTCN PAM
ucuaggacuccuugggcuua

SEQ ID NO: 33616 - RNA, 20 nt, Artificial Sequence
  spacer sequence CTCN PAM
uugggcuuacccaacggugu

SEQ ID NO: 33617 - RNA, 20 nt, Artificial Sequence
  spacer sequence CTCN PAM
cuaggcuuacgcaacaccgu

SEQ ID NO: 33618 - RNA, 20 nt, Artificial Sequence
  spacer sequence CTCN PAM
cccuuggcuugcaauuugcu

SEQ ID NO: 33619 - RNA, 20 nt, Artificial Sequence
  spacer sequence CTCN PAM
gaaacccaggauucuccccc

SEQ ID NO: 33620 - RNA, 20 nt, Artificial Sequence
  spacer sequence CTCN PAM
ccacaggcgagagccagaau

SEQ ID NO: 33621 - RNA, 20 nt, Artificial Sequence
  spacer sequence CTCN PAM
ccuguggggagauugccagu

SEQ ID NO: 33622 - RNA, 20 nt, Artificial Sequence
  spacer sequence CTCN PAM
cgccuguggggagauugcca

SEQ ID NO: 33623 - RNA, 20 nt, Artificial Sequence
  spacer sequence CTCN PAM
gacccuccccuggggggcgc

SEQ ID NO: 33624 - RNA, 20 nt, Artificial Sequence
  spacer sequence CTCN PAM
ccuggggggcgcuuugucug

SEQ ID NO: 33625 - RNA, 20 nt, Artificial Sequence
  spacer sequence CTCN PAM
aucgcuacuggcagacaaag

SEQ ID NO: 33626 - RNA, 20 nt, Artificial Sequence
  spacer sequence CTCN PAM
ccguuccccugucuccgcug

SEQ ID NO: 33627 - RNA, 20 nt, Artificial Sequence
  spacer sequence CTCN PAM
gcugcuguuuuauaagaugu

SEQ ID NO: 33628 - RNA, 20 nt, Artificial Sequence
  spacer sequence CTCN PAM
uuguuccaaaucuuugugac

SEQ ID NO: 33629 - RNA, 20 nt, Artificial Sequence
  spacer sequence CTCN PAM
gugucacaaagauuuggaac

SEQ ID NO: 33630 - RNA, 20 nt, Artificial Sequence
  spacer sequence CTCN PAM
gccccagacaccccgggcug

SEQ ID NO: 33631 - RNA, 20 nt, Artificial Sequence
  spacer sequence CTCN PAM
ggccucagucagcagagccg

SEQ ID NO: 33632 - RNA, 20 nt, Artificial Sequence
  spacer sequence CTCN PAM
gucagcagagccgucaccgg

SEQ ID NO: 33633 - RNA, 20 nt, Artificial Sequence
  spacer sequence CTCN PAM
gcugacugaggccugaguca

SEQ ID NO: 33634 - RNA, 20 nt, Artificial Sequence
  spacer sequence CTCN PAM
cggugacggcucugcugacu

SEQ ID NO: 33635 - RNA, 20 nt, Artificial Sequence
  spacer sequence CTCN PAM
gugugcagucgagugguggc

SEQ ID NO: 33636 - RNA, 20 nt, Artificial Sequence
  spacer sequence CTCN PAM
acugcacacggaguggacag

SEQ ID NO: 33637 - RNA, 20 nt, Artificial Sequence
  spacer sequence CTCN PAM
uggggagggaggcagcugcc

SEQ ID NO: 33638 - RNA, 20 nt, Artificial Sequence
  spacer sequence CTCN PAM
ccaggagccaccacucgacu

SEQ ID NO: 33639 - RNA, 20 nt, Artificial Sequence
  spacer sequence CTCN PAM
cuccccaggagccaccacuc

SEQ ID NO: 33640 - RNA, 20 nt, Artificial Sequence
  spacer sequence CTCN PAM
gcccgucccuaauacuguuc

SEQ ID NO: 33641 - RNA, 20 nt, Artificial Sequence
  spacer sequence CTCN PAM
ucgucguuggcuagguuuug

SEQ ID NO: 33642 - RNA, 20 nt, Artificial Sequence
  spacer sequence CTCN PAM
aaaguaauaaauccaaaacc

SEQ ID NO: 33643 - RNA, 20 nt, Artificial Sequence
  spacer sequence CTCN PAM
cccgacccuuuccgugaagg

SEQ ID NO: 33644 - RNA, 20 nt, Artificial Sequence
  spacer sequence CTCN PAM
cgcagcaaagguucacagga

SEQ ID NO: 33645 - RNA, 20 nt, Artificial Sequence
  spacer sequence CTCN PAM
cgucuacagacccaggccca

SEQ ID NO: 33646 - RNA, 20 nt, Artificial Sequence
  spacer sequence CTCN PAM
ucacgucuacagacccaggc

SEQ ID NO: 33647 - RNA, 20 nt, Artificial Sequence
  spacer sequence CTCN PAM
cagcuuugcuccuggagccc

SEQ ID NO: 33648 - RNA, 20 nt, Artificial Sequence
  spacer sequence CTCN PAM
gcuuugcuccuggagccccu

SEQ ID NO: 33649 - RNA, 20 nt, Artificial Sequence
  spacer sequence CTCN PAM
uggagccccucccucugggu

SEQ ID NO: 33650 - RNA, 20 nt, Artificial Sequence
  spacer sequence CTCN PAM
aggagcaaagcugagagauc

SEQ ID NO: 33651 - RNA, 20 nt, Artificial Sequence
  spacer sequence CTCN PAM
cucugggugaccugggacug

SEQ ID NO: 33652 - RNA, 20 nt, Artificial Sequence
  spacer sequence CTCN PAM
gggugaccugggacugggcg

SEQ ID NO: 33653 - RNA, 20 nt, Artificial Sequence
  spacer sequence CTCN PAM
uaggccaggcgcgguggcuc

SEQ ID NO: 33654 - RNA, 20 nt, Artificial Sequence
  spacer sequence CTCN PAM
cgccuguaaucccagcacuu

SEQ ID NO: 33655 - RNA, 20 nt, Artificial Sequence
  spacer sequence CTCN PAM
caaagugcugggauuacagg

SEQ ID NO: 33656 - RNA, 20 nt, Artificial Sequence
  spacer sequence CTCN PAM
ggugauccacccgcuuuggc

SEQ ID NO: 33657 - RNA, 20 nt, Artificial Sequence
  spacer sequence CTCN PAM
ugaccucaggugauccaccc

SEQ ID NO: 33658 - RNA, 20 nt, Artificial Sequence
  spacer sequence CTCN PAM
aacuccugaccucaggugau

SEQ ID NO: 33659 - RNA, 20 nt, Artificial Sequence
  spacer sequence CTCN PAM
auguuggccaggccauguug

SEQ ID NO: 33660 - RNA, 20 nt, Artificial Sequence
  spacer sequence CTCN PAM
caaguagcugggauuacagg

SEQ ID NO: 33661 - RNA, 20 nt, Artificial Sequence
  spacer sequence CTCN PAM
gccucccaaguagcugggau

SEQ ID NO: 33662 - RNA, 20 nt, Artificial Sequence
  spacer sequence CTCN PAM
ugccucagccucccaaguag

SEQ ID NO: 33663 - RNA, 20 nt, Artificial Sequence
  spacer sequence CTCN PAM
uggguucaagcgauucuccu

SEQ ID NO: 33664 - RNA, 20 nt, Artificial Sequence
  spacer sequence CTCN PAM
gccuccuggguucaagcgau

SEQ ID NO: 33665 - RNA, 20 nt, Artificial Sequence
  spacer sequence CTCN PAM
cugcaaccucugccuccugg

SEQ ID NO: 33666 - RNA, 20 nt, Artificial Sequence
  spacer sequence CTCN PAM
gcucacugcaaccucugccu

SEQ ID NO: 33667 - RNA, 20 nt, Artificial Sequence
  spacer sequence CTCN PAM
agccagggcaacaagaguga

SEQ ID NO: 33668 - RNA, 20 nt, Artificial Sequence
  spacer sequence CTCN PAM
uguugcccuggcuggagugc

SEQ ID NO: 33669 - RNA, 20 nt, Artificial Sequence
  spacer sequence CTCN PAM
gucucaaaaaaaaaaaaaag

SEQ ID NO: 33670 - RNA, 20 nt, Artificial Sequence
  spacer sequence CTCN PAM
aaaaaaaaaaaaagucacuc

SEQ ID NO: 33671 - RNA, 20 nt, Artificial Sequence
  spacer sequence CTCN PAM
uacauaguucuaguuacucc

SEQ ID NO: 33672 - RNA, 20 nt, Artificial Sequence
  spacer sequence CTCN PAM
uucucuuugagcuaucauua

SEQ ID NO: 33673 - RNA, 20 nt, Artificial Sequence
  spacer sequence CTCN PAM
uugagcuaucauuauucaca

SEQ ID NO: 33674 - RNA, 20 nt, Artificial Sequence
  spacer sequence CTCN PAM
aagagaaggaguaacuagaa

SEQ ID NO: 33675 - RNA, 20 nt, Artificial Sequence
  spacer sequence CTCN PAM
aaaauaaaguuaggaauauc

SEQ ID NO: 33676 - RNA, 20 nt, Artificial Sequence
  spacer sequence CTCN PAM
gucgcccaggcuggagugcc

SEQ ID NO: 33677 - RNA, 20 nt, Artificial Sequence
  spacer sequence CTCN PAM
agccugggcgacagagcaag

SEQ ID NO: 33678 - RNA, 20 nt, Artificial Sequence
  spacer sequence CTCN PAM
cugcagccuugaccuccugg

SEQ ID NO: 33679 - RNA, 20 nt, Artificial Sequence
  spacer sequence CTCN PAM
ugggcugaaggcucagccuc

SEQ ID NO: 33680 - RNA, 20 nt, Artificial Sequence
  spacer sequence CTCN PAM
gccucccgaguagcugggaa

SEQ ID NO: 33681 - RNA, 20 nt, Artificial Sequence
  spacer sequence CTCN PAM
cgaguagcugggaauuuuuu

SEQ ID NO: 33682 - RNA, 20 nt, Artificial Sequence
  spacer sequence CTCN PAM
ggaggcugagccuucagccc

SEQ ID NO: 33683 - RNA, 20 nt, Artificial Sequence
  spacer sequence CTCN PAM
acaaaaaaauacaaaaauuu

SEQ ID NO: 33684 - RNA, 20 nt, Artificial Sequence
  spacer sequence CTCN PAM
cuacaaaaaaauacaaaaau

SEQ ID NO: 33685 - RNA, 20 nt, Artificial Sequence
  spacer sequence CTCN PAM
cuguguuguccuuacuaacu

SEQ ID NO: 33686 - RNA, 20 nt, Artificial Sequence
  spacer sequence CTCN PAM
cugaaaagaaccauuccggc

SEQ ID NO: 33687 - RNA, 20 nt, Artificial Sequence
  spacer sequence CTCN PAM
aguaucuguaaugaauucuc

SEQ ID NO: 33688 - RNA, 20 nt, Artificial Sequence
  spacer sequence CTCN PAM
uguuccucccacagugggac

SEQ ID NO: 33689 - RNA, 20 nt, Artificial Sequence
  spacer sequence CTCN PAM
cacagugggaccugaaccgc

SEQ ID NO: 33690 - RNA, 20 nt, Artificial Sequence
  spacer sequence CTCN PAM
uaggugcgguuuggcgguuc

SEQ ID NO: 33691 - RNA, 20 nt, Artificial Sequence
  spacer sequence CTCN PAM
auaaauacuuguugaugugg

SEQ ID NO: 33692 - RNA, 20 nt, Artificial Sequence
  spacer sequence CTCN PAM
gucaucuacacgauggcacc

SEQ ID NO: 33693 - RNA, 20 nt, Artificial Sequence
  spacer sequence CTCN PAM
gguucgugcuccgucaucua

SEQ ID NO: 33694 - RNA, 20 nt, Artificial Sequence
  spacer sequence CTCN PAM
gacaggggcggcgacuuguc

SEQ ID NO: 33695 - RNA, 20 nt, Artificial Sequence
  spacer sequence CTCN PAM
guggaggaagcggcucugca

SEQ ID NO: 33696 - RNA, 20 nt, Artificial Sequence
  spacer sequence CTCN PAM
acggagugggacuuuggaca

SEQ ID NO: 33697 - RNA, 20 nt, Artificial Sequence
  spacer sequence CTCN PAM
gcagaccucaggcggcggcu

SEQ ID NO: 33698 - RNA, 20 nt, Artificial Sequence
  spacer sequence CTCN PAM
ggcggcggcugcucuaaucc

SEQ ID NO: 33699 - RNA, 20 nt, Artificial Sequence
  spacer sequence CTCN PAM
aaucccugcagccuguguuu

SEQ ID NO: 33700 - RNA, 20 nt, Artificial Sequence
  spacer sequence CTCN PAM
agacggcagagggcgcgugu

SEQ ID NO: 33701 - RNA, 20 nt, Artificial Sequence
  spacer sequence CTCN PAM
gccgucuggagggcaaaaca

SEQ ID NO: 33702 - RNA, 20 nt, Artificial Sequence
  spacer sequence CTCN PAM
gccgugcgcgcacacgcgcu

SEQ ID NO: 33703 - RNA, 20 nt, Artificial Sequence
  spacer sequence CTCN PAM
cgauaacugcgcaggcgcgg

SEQ ID NO: 33704 - RNA, 20 nt, Artificial Sequence
  spacer sequence CTCN PAM
ucugaggauccggcaagaug

SEQ ID NO: 33705 - RNA, 20 nt, Artificial Sequence
  spacer sequence CTCN PAM
gaagagaucgcuuugguccg

SEQ ID NO: 33706 - RNA, 20 nt, Artificial Sequence
  spacer sequence CTCN PAM
ccaucuugccggauccucag

SEQ ID NO: 33707 - RNA, 20 nt, Artificial Sequence
  spacer sequence CTCN PAM
gccgggccuauccggcucca

SEQ ID NO: 33708 - RNA, 20 nt, Artificial Sequence
  spacer sequence CTCN PAM
auccaaccucugaccgucuc

SEQ ID NO: 33709 - RNA, 20 nt, Artificial Sequence
  spacer sequence CTCN PAM
gaccgucucgcgggggccgc

SEQ ID NO: 33710 - RNA, 20 nt, Artificial Sequence
  spacer sequence CTCN PAM
cgggggccgcaguucguccc

SEQ ID NO: 33711 - RNA, 20 nt, Artificial Sequence
  spacer sequence CTCN PAM
cgacccugcaggcggcugga

SEQ ID NO: 33712 - RNA, 20 nt, Artificial Sequence
  spacer sequence CTCN PAM
ccccaacauccagccgccug

SEQ ID NO: 33713 - RNA, 20 nt, Artificial Sequence
  spacer sequence CTCN PAM
uaacccggagccgcgaguga

SEQ ID NO: 33714 - RNA, 20 nt, Artificial Sequence
  spacer sequence CTCN PAM
ggguuacgaggacccggaca

SEQ ID NO: 33715 - RNA, 20 nt, Artificial Sequence
  spacer sequence CTCN PAM
cggcuccggguuacgaggac

SEQ ID NO: 33716 - RNA, 20 nt, Artificial Sequence
  spacer sequence CTCN PAM
ggcccgguggccccgggaga

SEQ ID NO: 33717 - RNA, 20 nt, Artificial Sequence
  spacer sequence CTCN PAM
cggggccaccgggcccgagg

SEQ ID NO: 33718 - RNA, 20 nt, Artificial Sequence
  spacer sequence CTCN PAM
acuucugccugugcgggcgc

SEQ ID NO: 33719 - RNA, 20 nt, Artificial Sequence
  spacer sequence CTCN PAM
accagcugcuggacaugucc

SEQ ID NO: 33720 - RNA, 20 nt, Artificial Sequence
  spacer sequence CTCN PAM
cccggacaagccccaccgcu

SEQ ID NO: 33721 - RNA, 20 nt, Artificial Sequence
  spacer sequence CTCN PAM
gcggcggugggcgggcacgg

SEQ ID NO: 33722 - RNA, 20 nt, Artificial Sequence
  spacer sequence CTCN PAM
gcgcggguuuggaacugagu

SEQ ID NO: 33723 - RNA, 20 nt, Artificial Sequence
  spacer sequence CTCN PAM
guuccaaacccgcgcggaga

SEQ ID NO: 33724 - RNA, 20 nt, Artificial Sequence
  spacer sequence CTCN PAM
ggacaguuuucugggcgcaa

SEQ ID NO: 33725 - RNA, 20 nt, Artificial Sequence
  spacer sequence CTCN PAM
acgucucuggacaguuuucu

SEQ ID NO: 33726 - RNA, 20 nt, Artificial Sequence
  spacer sequence CTCN PAM
uuagauuuuaagggcggugg

SEQ ID NO: 33727 - RNA, 20 nt, Artificial Sequence
  spacer sequence CTCN PAM
accgcccuuaaaaucuaagg

SEQ ID NO: 33728 - RNA, 20 nt, Artificial Sequence
  spacer sequence CTCN PAM
aaauaaucaaaaauuaaaaa

SEQ ID NO: 33729 - RNA, 20 nt, Artificial Sequence
  spacer sequence CTCN PAM
gccucaaaauaaucaaaaau

SEQ ID NO: 33730 - RNA, 20 nt, Artificial Sequence
  spacer sequence CTCN PAM
uccugucgcccaggcuggag

SEQ ID NO: 33731 - RNA, 20 nt, Artificial Sequence
  spacer sequence CTCN PAM
agccugggcgacaggaugag

SEQ ID NO: 33732 - RNA, 20 nt, Artificial Sequence
  spacer sequence CTCN PAM
gucccagcucacugcagccu

SEQ ID NO: 33733 - RNA, 20 nt, Artificial Sequence
  spacer sequence CTCN PAM
cugcagccucccacucccgg

SEQ ID NO: 33734 - RNA, 20 nt, Artificial Sequence
  spacer sequence CTCN PAM
cacucccggguucaagcgau

SEQ ID NO: 33735 - RNA, 20 nt, Artificial Sequence
  spacer sequence CTCN PAM
cggguucaagcgauucucuu

SEQ ID NO: 33736 - RNA, 20 nt, Artificial Sequence
  spacer sequence CTCN PAM
ugccucagccucucgaguag

SEQ ID NO: 33737 - RNA, 20 nt, Artificial Sequence
  spacer sequence CTCN PAM
gccucucgaguagcugggau

SEQ ID NO: 33738 - RNA, 20 nt, Artificial Sequence
  spacer sequence CTCN PAM
cgaguagcugggauuagagg

SEQ ID NO: 33739 - RNA, 20 nt, Artificial Sequence
  spacer sequence CTCN PAM
aguagcugggauuagagggc

SEQ ID NO: 33740 - RNA, 20 nt, Artificial Sequence
  spacer sequence CTCN PAM
agaggcugaggcaagagaau

SEQ ID NO: 33741 - RNA, 20 nt, Artificial Sequence
  spacer sequence CTCN PAM
aaucccagcuacucgagagg

SEQ ID NO: 33742 - RNA, 20 nt, Artificial Sequence
  spacer sequence CTCN PAM
acuaaaaauacaaaaauuag

SEQ ID NO: 33743 - RNA, 20 nt, Artificial Sequence
  spacer sequence CTCN PAM
ucucuacuaaaaauacaaaa

SEQ ID NO: 33744 - RNA, 20 nt, Artificial Sequence
  spacer sequence CTCN PAM
aacuccugaccucaggugau

SEQ ID NO: 33745 - RNA, 20 nt, Artificial Sequence
  spacer sequence CTCN PAM
ugaccucaggugauccaccu

SEQ ID NO: 33746 - RNA, 20 nt, Artificial Sequence
  spacer sequence CTCN PAM
ggugauccaccugccucggc

SEQ ID NO: 33747 - RNA, 20 nt, Artificial Sequence
  spacer sequence CTCN PAM
gccucccaaagugcugggau

SEQ ID NO: 33748 - RNA, 20 nt, Artificial Sequence
  spacer sequence CTCN PAM
caaagugcugggauuacagg

SEQ ID NO: 33749 - RNA, 20 nt, Artificial Sequence
  spacer sequence CTCN PAM
gugucguccagguuggucuu

SEQ ID NO: 33750 - RNA, 20 nt, Artificial Sequence
  spacer sequence CTCN PAM
ugggcucaagcgacccuccc

SEQ ID NO: 33751 - RNA, 20 nt, Artificial Sequence
  spacer sequence CTCN PAM
agcgacccucccgccucaac

SEQ ID NO: 33752 - RNA, 20 nt, Artificial Sequence
  spacer sequence CTCN PAM
cgccucaaccucccgaagug

SEQ ID NO: 33753 - RNA, 20 nt, Artificial Sequence
  spacer sequence CTCN PAM
accucccgaagugcugggau

SEQ ID NO: 33754 - RNA, 20 nt, Artificial Sequence
  spacer sequence CTCN PAM
cgaagugcugggaucacagg

SEQ ID NO: 33755 - RNA, 20 nt, Artificial Sequence
  spacer sequence CTCN PAM
cgccugugaucccagcacuu

SEQ ID NO: 33756 - RNA, 20 nt, Artificial Sequence
  spacer sequence CTCN PAM
aaaaacgcaggggaaggcag

SEQ ID NO: 33757 - RNA, 20 nt, Artificial Sequence
  spacer sequence CTCN PAM
ggccaaaggccucuaaaaac

SEQ ID NO: 33758 - RNA, 20 nt, Artificial Sequence
  spacer sequence CTCN PAM
gacaaggugcugcagcguac

SEQ ID NO: 33759 - RNA, 20 nt, Artificial Sequence
  spacer sequence CTCN PAM
gggccgcuuguucucucuga

SEQ ID NO: 33760 - RNA, 20 nt, Artificial Sequence
  spacer sequence CTCN PAM
cugaaucucugcagucacac

SEQ ID NO: 33761 - RNA, 20 nt, Artificial Sequence
  spacer sequence CTCN PAM
gaaucucugcagucacacgg

SEQ ID NO: 33762 - RNA, 20 nt, Artificial Sequence
  spacer sequence CTCN PAM
gcagucacacgguggcucuu

SEQ ID NO: 33763 - RNA, 20 nt, Artificial Sequence
  spacer sequence CTCN PAM
ugcaugugaggggugagucg

SEQ ID NO: 33764 - RNA, 20 nt, Artificial Sequence
  spacer sequence CTCN PAM
caugcaagagccaccgugug

SEQ ID NO: 33765 - RNA, 20 nt, Artificial Sequence
  spacer sequence CTCN PAM
ccccucacaugcaagagcca

SEQ ID NO: 33766 - RNA, 20 nt, Artificial Sequence
  spacer sequence CTCN PAM
ggcacccccgccagauaugc

SEQ ID NO: 33767 - RNA, 20 nt, Artificial Sequence
  spacer sequence CTCN PAM
gucccuggagagaaccaagc

SEQ ID NO: 33768 - RNA, 20 nt, Artificial Sequence
  spacer sequence CTCN PAM
agggacagagccgcagugga

SEQ ID NO: 33769 - RNA, 20 nt, Artificial Sequence
  spacer sequence CTCN PAM
ccagggacagagccgcagug

SEQ ID NO: 33770 - RNA, 20 nt, Artificial Sequence
  spacer sequence CTCN PAM
guccgccggagugcguaggg

SEQ ID NO: 33771 - RNA, 20 nt, Artificial Sequence
  spacer sequence CTCN PAM
ggcggacagagaacuaaggc

SEQ ID NO: 33772 - RNA, 20 nt, Artificial Sequence
  spacer sequence CTCN PAM
ccaggccgggccgcucacaa

SEQ ID NO: 33773 - RNA, 20 nt, Artificial Sequence
  spacer sequence CTCN PAM
caaaacugccuggugcaucc

SEQ ID NO: 33774 - RNA, 20 nt, Artificial Sequence
  spacer sequence CTCN PAM
ccagcgagcagcugaugcag

SEQ ID NO: 33775 - RNA, 20 nt, Artificial Sequence
  spacer sequence CTCN PAM
cuggggaggaugcaccaggc

SEQ ID NO: 33776 - RNA, 20 nt, Artificial Sequence
  spacer sequence CTCN PAM
cugcugaagcgccugcgcaa

SEQ ID NO: 33777 - RNA, 20 nt, Artificial Sequence
  spacer sequence CTCN PAM
uucuuggccuugcgcaggcg

SEQ ID NO: 33778 - RNA, 20 nt, Artificial Sequence
  spacer sequence CTCN PAM
augggcggcgccuccuucuu

SEQ ID NO: 33779 - RNA, 20 nt, Artificial Sequence
  spacer sequence CTCN PAM
gguaggaugaucaugucccg

SEQ ID NO: 33780 - RNA, 20 nt, Artificial Sequence
  spacer sequence CTCN PAM
accugguugaaggucuugcc

SEQ ID NO: 33781 - RNA, 20 nt, Artificial Sequence
  spacer sequence CTCN PAM
uggucucccgcagcccgaga

SEQ ID NO: 33782 - RNA, 20 nt, Artificial Sequence
  spacer sequence CTCN PAM
cgcagcccgagaugaucggc

SEQ ID NO: 33783 - RNA, 20 nt, Artificial Sequence
  spacer sequence CTCN PAM
ggcugcgggagaccaagagc

SEQ ID NO: 33784 - RNA, 20 nt, Artificial Sequence
  spacer sequence CTCN PAM
cccagguaguggccgaucau

SEQ ID NO: 33785 - RNA, 20 nt, Artificial Sequence
  spacer sequence CTCN PAM
aucaccuacaagcccguaaa

SEQ ID NO: 33786 - RNA, 20 nt, Artificial Sequence
  spacer sequence CTCN PAM
ucccgcuucaucccucucaa

SEQ ID NO: 33787 - RNA, 20 nt, Artificial Sequence
  spacer sequence CTCN PAM
cgcuucaucccucucaagua

SEQ ID NO: 33788 - RNA, 20 nt, Artificial Sequence
  spacer sequence CTCN PAM
caaguaauggcucagcuaau

SEQ ID NO: 33789 - RNA, 20 nt, Artificial Sequence
  spacer sequence CTCN PAM
aguaauggcucagcuaauaa

SEQ ID NO: 33790 - RNA, 20 nt, Artificial Sequence
  spacer sequence CTCN PAM
gcuaauaaaggcgcacauga

SEQ ID NO: 33791 - RNA, 20 nt, Artificial Sequence
  spacer sequence CTCN PAM
aguccuuugcgcagcuuguu

SEQ ID NO: 33792 - RNA, 20 nt, Artificial Sequence
  spacer sequence CTCN PAM
ggacgccaggaagaacaagc

SEQ ID NO: 33793 - RNA, 20 nt, Artificial Sequence
  spacer sequence CTCN PAM
gggaggggccugggccugcu

SEQ ID NO: 33794 - RNA, 20 nt, Artificial Sequence
  spacer sequence CTCN PAM
cagagcucgggacgccagga

SEQ ID NO: 33795 - RNA, 20 nt, Artificial Sequence
  spacer sequence CTCN PAM
caccacgaaccugaagcagg

SEQ ID NO: 33796 - RNA, 20 nt, Artificial Sequence
  spacer sequence CTCN PAM
ucacaccacgaaccugaagc

SEQ ID NO: 33797 - RNA, 20 nt, Artificial Sequence
  spacer sequence CTCN PAM
uggugucgaagacugacagc

SEQ ID NO: 33798 - RNA, 20 nt, Artificial Sequence
  spacer sequence CTCN PAM
gcugccccugcuccugucug

SEQ ID NO: 33799 - RNA, 20 nt, Artificial Sequence
  spacer sequence CTCN PAM
ugucugcagggacagcugug

SEQ ID NO: 33800 - RNA, 20 nt, Artificial Sequence
  spacer sequence CTCN PAM
acagcugucccugcagacag

SEQ ID NO: 33801 - RNA, 20 nt, Artificial Sequence
  spacer sequence CTCN PAM
gucccuuuuggcccccucag

SEQ ID NO: 33802 - RNA, 20 nt, Artificial Sequence
  spacer sequence CTCN PAM
gcguucuugaccucggggca

SEQ ID NO: 33803 - RNA, 20 nt, Artificial Sequence
  spacer sequence CTCN PAM
gggcagcugccuggccucac

SEQ ID NO: 33804 - RNA, 20 nt, Artificial Sequence
  spacer sequence CTCN PAM
cucugucuucuggguaccuc

SEQ ID NO: 33805 - RNA, 20 nt, Artificial Sequence
  spacer sequence CTCN PAM
gucuucuggguaccucacgu

SEQ ID NO: 33806 - RNA, 20 nt, Artificial Sequence
  spacer sequence CTCN PAM
cguagagggggccacuccug

SEQ ID NO: 33807 - RNA, 20 nt, Artificial Sequence
  spacer sequence CTCN PAM
acgugagguacccagaagac

SEQ ID NO: 33808 - RNA, 20 nt, Artificial Sequence
  spacer sequence CTCN PAM
ugggcuaagugcagccccuc

SEQ ID NO: 33809 - RNA, 20 nt, Artificial Sequence
  spacer sequence CTCN PAM
agcccucaccuggccugggc

SEQ ID NO: 33810 - RNA, 20 nt, Artificial Sequence
  spacer sequence CTCN PAM
ccuggccugggcucuccuuu

SEQ ID NO: 33811 - RNA, 20 nt, Artificial Sequence
  spacer sequence CTCN PAM
ccuuucuggcuucccucauc

SEQ ID NO: 33812 - RNA, 20 nt, Artificial Sequence
  spacer sequence CTCN PAM
uuucuggcuucccucaucuc

SEQ ID NO: 33813 - RNA, 20 nt, Artificial Sequence
  spacer sequence CTCN PAM
ucuccuguggaggguucccg

SEQ ID NO: 33814 - RNA, 20 nt, Artificial Sequence
  spacer sequence CTCN PAM
uguggaggguucccgcagga

SEQ ID NO: 33815 - RNA, 20 nt, Artificial Sequence
  spacer sequence CTCN PAM
acaggagaugagggaagcca

SEQ ID NO: 33816 - RNA, 20 nt, Artificial Sequence
  spacer sequence CTCN PAM
gguggcccaaagguuccugc

SEQ ID NO: 33817 - RNA, 20 nt, Artificial Sequence
  spacer sequence CTCN PAM
cuucuauccucaccccugcu

SEQ ID NO: 33818 - RNA, 20 nt, Artificial Sequence
  spacer sequence CTCN PAM
ccccugcuuggcuucuuaga

SEQ ID NO: 33819 - RNA, 20 nt, Artificial Sequence
  spacer sequence CTCN PAM
ugacucuccuccugacacca

SEQ ID NO: 33820 - RNA, 20 nt, Artificial Sequence
  spacer sequence CTCN PAM
ccuccugacaccacgcugcu

SEQ ID NO: 33821 - RNA, 20 nt, Artificial Sequence
  spacer sequence CTCN PAM
uccugacaccacgcugcugg

SEQ ID NO: 33822 - RNA, 20 nt, Artificial Sequence
  spacer sequence CTCN PAM
ugacaccacgcugcuggcau

SEQ ID NO: 33823 - RNA, 20 nt, Artificial Sequence
  spacer sequence CTCN PAM
ucucccagcaggcuccaugg

SEQ ID NO: 33824 - RNA, 20 nt, Artificial Sequence
  spacer sequence CTCN PAM
cccagcaggcuccauggcug

SEQ ID NO: 33825 - RNA, 20 nt, Artificial Sequence
  spacer sequence CTCN PAM
cagcaggcuccauggcugca

SEQ ID NO: 33826 - RNA, 20 nt, Artificial Sequence
  spacer sequence CTCN PAM
auggcugcagccagccccau

SEQ ID NO: 33827 - RNA, 20 nt, Artificial Sequence
  spacer sequence CTCN PAM
gucccggacacaaagcccca

SEQ ID NO: 33828 - RNA, 20 nt, Artificial Sequence
  spacer sequence CTCN PAM
gucuccuuugcacagaaugc

SEQ ID NO: 33829 - RNA, 20 nt, Artificial Sequence
  spacer sequence CTCN PAM
uuugcacagaaugcuugaaa

SEQ ID NO: 33830 - RNA, 20 nt, Artificial Sequence
  spacer sequence CTCN PAM
augggcucucugauggccgu

SEQ ID NO: 33831 - RNA, 20 nt, Artificial Sequence
  spacer sequence CTCN PAM
cugauggccguacguggguu

SEQ ID NO: 33832 - RNA, 20 nt, Artificial Sequence
  spacer sequence CTCN PAM
gauggccguacguggguugg

SEQ ID NO: 33833 - RNA, 20 nt, Artificial Sequence
  spacer sequence CTCN PAM
aacccacguacggccaucag

SEQ ID NO: 33834 - RNA, 20 nt, Artificial Sequence
  spacer sequence CTCN PAM
ccauguucuccaacccacgu

SEQ ID NO: 33835 - RNA, 20 nt, Artificial Sequence
  spacer sequence CTCN PAM
agcauugaacgggguuaguu

SEQ ID NO: 33836 - RNA, 20 nt, Artificial Sequence
  spacer sequence CTCN PAM
gcccagaaggugguaacuuu

SEQ ID NO: 33837 - RNA, 20 nt, Artificial Sequence
  spacer sequence CTCN PAM
cuaagcacccagcagagugg

SEQ ID NO: 33838 - RNA, 20 nt, Artificial Sequence
  spacer sequence CTCN PAM
gcugggugcuuagugagcaa

SEQ ID NO: 33839 - RNA, 20 nt, Artificial Sequence
  spacer sequence CTCN PAM
ccuugggcaguggacaggag

SEQ ID NO: 33840 - RNA, 20 nt, Artificial Sequence
  spacer sequence CTCN PAM
uguccacugcccaaggggag

SEQ ID NO: 33841 - RNA, 20 nt, Artificial Sequence
  spacer sequence CTCN PAM
cccuccuguccacugcccaa

SEQ ID NO: 33842 - RNA, 20 nt, Artificial Sequence
  spacer sequence CTCN PAM
cacccuccuguccacugccc

SEQ ID NO: 33843 - RNA, 20 nt, Artificial Sequence
  spacer sequence CTCN PAM
gccaggcagaugggggcagg

SEQ ID NO: 33844 - RNA, 20 nt, Artificial Sequence
  spacer sequence CTCN PAM
ccugcccccaucugccuggc

SEQ ID NO: 33845 - RNA, 20 nt, Artificial Sequence
  spacer sequence CTCN PAM
caucuccccugcccccaucu

SEQ ID NO: 33846 - RNA, 20 nt, Artificial Sequence
  spacer sequence CTCN PAM
ucacaucuccccugccccca

SEQ ID NO: 33847 - RNA, 20 nt, Artificial Sequence
  spacer sequence CTCN PAM
aauggcccacaacagccucc

SEQ ID NO: 33848 - RNA, 20 nt, Artificial Sequence
  spacer sequence CTCN PAM
ugugggcccucuucuauaau

SEQ ID NO: 33849 - RNA, 20 nt, Artificial Sequence
  spacer sequence CTCN PAM
ucuauaauguuucuccacuu

SEQ ID NO: 33850 - RNA, 20 nt, Artificial Sequence
  spacer sequence CTCN PAM
acuuuuuuuuuuaaauuugu

SEQ ID NO: 33851 - RNA, 20 nt, Artificial Sequence
  spacer sequence CTCN PAM
ggcugggcaacaaauuuaaa

SEQ ID NO: 33852 - RNA, 20 nt, Artificial Sequence
  spacer sequence CTCN PAM
cugcagccuaaaucucaugg

SEQ ID NO: 33853 - RNA, 20 nt, Artificial Sequence
  spacer sequence CTCN PAM
ugggcucaggugaucuuccc

SEQ ID NO: 33854 - RNA, 20 nt, Artificial Sequence
  spacer sequence CTCN PAM
ggugaucuucccacugcuuc

SEQ ID NO: 33855 - RNA, 20 nt, Artificial Sequence
  spacer sequence CTCN PAM
ugccugugaucccagcacuu

SEQ ID NO: 33856 - RNA, 20 nt, Artificial Sequence
  spacer sequence CTCN PAM
ggaggcuggggcaggagaau

SEQ ID NO: 33857 - RNA, 20 nt, Artificial Sequence
  spacer sequence CTCN PAM
ugaguagcugggacuacagg

SEQ ID NO: 33858 - RNA, 20 nt, Artificial Sequence
  spacer sequence CTCN PAM
ugccccagccuccugaguag

SEQ ID NO: 33859 - RNA, 20 nt, Artificial Sequence
  spacer sequence CTCN PAM
gguucaugccauucuccugc

SEQ ID NO: 33860 - RNA, 20 nt, Artificial Sequence
  spacer sequence CTCN PAM
cggguucaugccauucuccu

SEQ ID NO: 33861 - RNA, 20 nt, Artificial Sequence
  spacer sequence CTCN PAM
gccucucggguucaugccau

SEQ ID NO: 33862 - RNA, 20 nt, Artificial Sequence
  spacer sequence CTCN PAM
cugcaagcucugccucucgg

SEQ ID NO: 33863 - RNA, 20 nt, Artificial Sequence
  spacer sequence CTCN PAM
gcucacugcaagcucugccu

SEQ ID NO: 33864 - RNA, 20 nt, Artificial Sequence
  spacer sequence CTCN PAM
agccugggcgacagagcaag

SEQ ID NO: 33865 - RNA, 20 nt, Artificial Sequence
  spacer sequence CTCN PAM
gucgcccaggcuggagugca

SEQ ID NO: 33866 - RNA, 20 nt, Artificial Sequence
  spacer sequence CTCN PAM
gucucaaaaaaaaaaauauu

SEQ ID NO: 33867 - RNA, 20 nt, Artificial Sequence
  spacer sequence CTCN PAM
aaaaaaaaaauauuguugag

SEQ ID NO: 33868 - RNA, 20 nt, Artificial Sequence
  spacer sequence CTCN PAM
acaauauuuuuuuuuuugag

SEQ ID NO: 33869 - RNA, 20 nt, Artificial Sequence
  spacer sequence CTCN PAM
caacaauauuuuuuuuuuug

SEQ ID NO: 33870 - RNA, 20 nt, Artificial Sequence
  spacer sequence CTCN PAM
cucaacaauauuuuuuuuuu

SEQ ID NO: 33871 - RNA, 20 nt, Artificial Sequence
  spacer sequence CTCN PAM
gucccuuccuuccuuccuuc

SEQ ID NO: 33872 - RNA, 20 nt, Artificial Sequence
  spacer sequence CTCN PAM
cugucccuuccuuccuuccu

SEQ ID NO: 33873 - RNA, 20 nt, Artificial Sequence
  spacer sequence CTCN PAM
cucugucccuuccuuccuuc

SEQ ID NO: 33874 - RNA, 20 nt, Artificial Sequence
  spacer sequence CTCN PAM
uucuuuccuuuucccucucu

SEQ ID NO: 33875 - RNA, 20 nt, Artificial Sequence
  spacer sequence CTCN PAM
uuccuucuuuccuuucuuuc

SEQ ID NO: 33876 - RNA, 20 nt, Artificial Sequence
  spacer sequence CTCN PAM
uuccuuccuuuuucuucucc

SEQ ID NO: 33877 - RNA, 20 nt, Artificial Sequence
  spacer sequence CTCN PAM
ccuuccuuccuuuuucuucu

SEQ ID NO: 33878 - RNA, 20 nt, Artificial Sequence
  spacer sequence CTCN PAM
cuccuuccuuccuuuuucuu

SEQ ID NO: 33879 - RNA, 20 nt, Artificial Sequence
  spacer sequence CTCN PAM
cucuccuuccuuccuuuuuc

SEQ ID NO: 33880 - RNA, 20 nt, Artificial Sequence
  spacer sequence CTCN PAM
uuauuuccuuuuucuuuuuu

SEQ ID NO: 33881 - RNA, 20 nt, Artificial Sequence
  spacer sequence CTCN PAM
cuuuucuucuuuacuuucuu

SEQ ID NO: 33882 - RNA, 20 nt, Artificial Sequence
  spacer sequence CTCN PAM
uuccuuccuuuccuuucuuu

SEQ ID NO: 33883 - RNA, 20 nt, Artificial Sequence
  spacer sequence CTCN PAM
ccuuccuuucuuccguucuu

SEQ ID NO: 33884 - RNA, 20 nt, Artificial Sequence
  spacer sequence CTCN PAM
cgccuuccuuucuuccguuc

SEQ ID NO: 33885 - RNA, 20 nt, Artificial Sequence
  spacer sequence CTCN PAM
cucgccuuccuuucuuccgu

SEQ ID NO: 33886 - RNA, 20 nt, Artificial Sequence
  spacer sequence CTCN PAM
uucuuuucuuuuucuuucuc

SEQ ID NO: 33887 - RNA, 20 nt, Artificial Sequence
  spacer sequence CTCN PAM
uuccuuuuucuuucuuccuc

SEQ ID NO: 33888 - RNA, 20 nt, Artificial Sequence
  spacer sequence CTCN PAM
agccuguaaucccagcacuu

SEQ ID NO: 33889 - RNA, 20 nt, Artificial Sequence
  spacer sequence CTCN PAM
caaagugcugggauuacagg

SEQ ID NO: 33890 - RNA, 20 nt, Artificial Sequence
  spacer sequence CTCN PAM
gccucccaaagugcugggau

SEQ ID NO: 33891 - RNA, 20 nt, Artificial Sequence
  spacer sequence CTCN PAM
ugauucgcccaccucggccu

SEQ ID NO: 33892 - RNA, 20 nt, Artificial Sequence
  spacer sequence CTCN PAM
ugaccucgugauucgcccac

SEQ ID NO: 33893 - RNA, 20 nt, Artificial Sequence
  spacer sequence CTCN PAM
aucuccugaccucgugauuc

SEQ ID NO: 33894 - RNA, 20 nt, Artificial Sequence
  spacer sequence CTCN PAM
acuaaaaaaggaaggaaaga

SEQ ID NO: 33895 - RNA, 20 nt, Artificial Sequence
  spacer sequence CTCN PAM
uuccuuccuuuuuuaguaga

SEQ ID NO: 33896 - RNA, 20 nt, Artificial Sequence
  spacer sequence CTCN PAM
cuuccuuccuuuucuuuacu

SEQ ID NO: 33897 - RNA, 20 nt, Artificial Sequence
  spacer sequence CTCN PAM
cucccuuccuuccuuuucuu

SEQ ID NO: 33898 - RNA, 20 nt, Artificial Sequence
  spacer sequence CTCN PAM
cucccucccuuccuuccuuu

SEQ ID NO: 33899 - RNA, 20 nt, Artificial Sequence
  spacer sequence CTCN PAM
agccugggcgacagagcgag

SEQ ID NO: 33900 - RNA, 20 nt, Artificial Sequence
  spacer sequence CTCN PAM
gcucacugcaagcuccgccu

SEQ ID NO: 33901 - RNA, 20 nt, Artificial Sequence
  spacer sequence CTCN PAM
cugcaagcuccgccucccgg

SEQ ID NO: 33902 - RNA, 20 nt, Artificial Sequence
  spacer sequence CTCN PAM
gccucccggguucacaccau

SEQ ID NO: 33903 - RNA, 20 nt, Artificial Sequence
  spacer sequence CTCN PAM
cggguucacaccauucuccu

SEQ ID NO: 33904 - RNA, 20 nt, Artificial Sequence
  spacer sequence CTCN PAM
ugccuaagccuccugaauag

SEQ ID NO: 33905 - RNA, 20 nt, Artificial Sequence
  spacer sequence CTCN PAM
ugaauagcugggacuacagg

SEQ ID NO: 33906 - RNA, 20 nt, Artificial Sequence
  spacer sequence CTCN PAM
acugaaaauacaaaaaaauu

SEQ ID NO: 33907 - RNA, 20 nt, Artificial Sequence
  spacer sequence CTCN PAM
ucucgauuuccugaccuugu

SEQ ID NO: 33908 - RNA, 20 nt, Artificial Sequence
  spacer sequence CTCN PAM
auuuccugaccuugugaucc

SEQ ID NO: 33909 - RNA, 20 nt, Artificial Sequence
  spacer sequence CTCN PAM
gccucccaaagugcugggau

SEQ ID NO: 33910 - RNA, 20 nt, Artificial Sequence
  spacer sequence CTCN PAM
caaagugcugggauuacagg

SEQ ID NO: 33911 - RNA, 20 nt, Artificial Sequence
  spacer sequence CTCN PAM
cgccuguaaucccagcacuu

SEQ ID NO: 33912 - RNA, 20 nt, Artificial Sequence
  spacer sequence CTCN PAM
uacucuuuggaacccauuac

SEQ ID NO: 33913 - RNA, 20 nt, Artificial Sequence
  spacer sequence CTCN PAM
uuggaacccauuacgguguc

SEQ ID NO: 33914 - RNA, 20 nt, Artificial Sequence
  spacer sequence CTCN PAM
aucccaugaccuagacggug

SEQ ID NO: 33915 - RNA, 20 nt, Artificial Sequence
  spacer sequence CTCN PAM
uuaccagagccccuggggcc

SEQ ID NO: 33916 - RNA, 20 nt, Artificial Sequence
  spacer sequence CTCN PAM
gguaaggagggacagacggc

SEQ ID NO: 33917 - RNA, 20 nt, Artificial Sequence
  spacer sequence CTCN PAM
gggccccaggggcucuggua

SEQ ID NO: 33918 - RNA, 20 nt, Artificial Sequence
  spacer sequence CTCN PAM
ucugggccccaggggcucug

SEQ ID NO: 33919 - RNA, 20 nt, Artificial Sequence
  spacer sequence CTCN PAM
cuccucugggccccaggggc

SEQ ID NO: 33920 - RNA, 20 nt, Artificial Sequence
  spacer sequence CTCN PAM
cccucccuccucugggcccc

SEQ ID NO: 33921 - RNA, 20 nt, Artificial Sequence
  spacer sequence CTCN PAM
uguccucccccucccuccuc

SEQ ID NO: 33922 - RNA, 20 nt, Artificial Sequence
  spacer sequence CTCN PAM
ucuugcuguauagacuuggg

SEQ ID NO: 33923 - RNA, 20 nt, Artificial Sequence
  spacer sequence CTCN PAM
ugcuguauagacuuggggcc

SEQ ID NO: 33924 - RNA, 20 nt, Artificial Sequence
  spacer sequence CTCN PAM
gacccgcccgggccccaagu

SEQ ID NO: 33925 - RNA, 20 nt, Artificial Sequence
  spacer sequence CTCN PAM
ugguuguuaugaacagcugu

SEQ ID NO: 33926 - RNA, 20 nt, Artificial Sequence
  spacer sequence CTCN PAM
uggggccaccagccaucuuc

SEQ ID NO: 33927 - RNA, 20 nt, Artificial Sequence
  spacer sequence CTCN PAM
gcugccuccuggggccacca

SEQ ID NO: 33928 - RNA, 20 nt, Artificial Sequence
  spacer sequence CTCN PAM
aggccaggcucaccuugggg

SEQ ID NO: 33929 - RNA, 20 nt, Artificial Sequence
  spacer sequence CTCN PAM
ccuugggguuuuucuucagg

SEQ ID NO: 33930 - RNA, 20 nt, Artificial Sequence
  spacer sequence CTCN PAM
ccugcugaagcccccgaggg

SEQ ID NO: 33931 - RNA, 20 nt, Artificial Sequence
  spacer sequence CTCN PAM
ggggcuucagcaggggagcc

SEQ ID NO: 33932 - RNA, 20 nt, Artificial Sequence
  spacer sequence CTCN PAM
cugggagucccagaagcuga

SEQ ID NO: 33933 - RNA, 20 nt, Artificial Sequence
  spacer sequence CTCN PAM
gggagucccagaagcugagc

SEQ ID NO: 33934 - RNA, 20 nt, Artificial Sequence
  spacer sequence CTCN PAM
cagagagcaccugcugggga

SEQ ID NO: 33935 - RNA, 20 nt, Artificial Sequence
  spacer sequence CTCN PAM
gcuucugggacucccagaga

SEQ ID NO: 33936 - RNA, 20 nt, Artificial Sequence
  spacer sequence CTCN PAM
gccaagcucagcuucuggga

SEQ ID NO: 33937 - RNA, 20 nt, Artificial Sequence
  spacer sequence CTCN PAM
ugauauuuagaagaccuugu

SEQ ID NO: 33938 - RNA, 20 nt, Artificial Sequence
  spacer sequence CTCN PAM
cucccccuugucggggucua

SEQ ID NO: 33939 - RNA, 20 nt, Artificial Sequence
  spacer sequence CTCN PAM
cccuugucggggucuagggu

SEQ ID NO: 33940 - RNA, 20 nt, Artificial Sequence
  spacer sequence CTCN PAM
aagcccccacuucccgucua

SEQ ID NO: 33941 - RNA, 20 nt, Artificial Sequence
  spacer sequence CTCN PAM
accucccgguuacccuggga

SEQ ID NO: 33942 - RNA, 20 nt, Artificial Sequence
  spacer sequence CTCN PAM
cgguuacccugggacaccug

SEQ ID NO: 33943 - RNA, 20 nt, Artificial Sequence
  spacer sequence CTCN PAM
gaccggggcccaccccacag

SEQ ID NO: 33944 - RNA, 20 nt, Artificial Sequence
  spacer sequence CTCN PAM
augcggcccgccccgauugc

SEQ ID NO: 33945 - RNA, 20 nt, Artificial Sequence
  spacer sequence CTCN PAM
cgccccgccuccaugcggcc

SEQ ID NO: 33946 - RNA, 20 nt, Artificial Sequence
  spacer sequence CTCN PAM
cucccgccaaaccgccgagu

SEQ ID NO: 33947 - RNA, 20 nt, Artificial Sequence
  spacer sequence CTCN PAM
cgccaaaccgccgagugggc

SEQ ID NO: 33948 - RNA, 20 nt, Artificial Sequence
  spacer sequence CTCN PAM
gcgguuuggcgggagggagg

SEQ ID NO: 33949 - RNA, 20 nt, Artificial Sequence
  spacer sequence CTCN PAM
cagggggccuugcggcuacu

SEQ ID NO: 33950 - RNA, 20 nt, Artificial Sequence
  spacer sequence CTCN PAM
gccaggaggggcgcgaagau

SEQ ID NO: 33951 - RNA, 20 nt, Artificial Sequence
  spacer sequence CTCN PAM
uggcugaguagccgcaaggc

SEQ ID NO: 33952 - RNA, 20 nt, Artificial Sequence
  spacer sequence CTCN PAM
cgcuucuguuagaucuucgc

SEQ ID NO: 33953 - RNA, 20 nt, Artificial Sequence
  spacer sequence CTCN PAM
cccgcuucuguuagaucuuc

SEQ ID NO: 33954 - RNA, 20 nt, Artificial Sequence
  spacer sequence CTCN PAM
ggagccucaguuuucccauu

SEQ ID NO: 33955 - RNA, 20 nt, Artificial Sequence
  spacer sequence CTCN PAM
cgagggugugggucugcgga

SEQ ID NO: 33956 - RNA, 20 nt, Artificial Sequence
  spacer sequence CTCN PAM
guuuucccauuuguacaacg

SEQ ID NO: 33957 - RNA, 20 nt, Artificial Sequence
  spacer sequence CTCN PAM
ggguuagucuugucguugua

SEQ ID NO: 33958 - RNA, 20 nt, Artificial Sequence
  spacer sequence CTCN PAM
cccacuuuccaacacacccc

SEQ ID NO: 33959 - RNA, 20 nt, Artificial Sequence
  spacer sequence CTCN PAM
cacuuuccaacacaccccuc

SEQ ID NO: 33960 - RNA, 20 nt, Artificial Sequence
  spacer sequence CTCN PAM
uucgagaaucagcccggccu

SEQ ID NO: 33961 - RNA, 20 nt, Artificial Sequence
  spacer sequence CTCN PAM
aaggagggguguguuggaaa

SEQ ID NO: 33962 - RNA, 20 nt, Artificial Sequence
  spacer sequence CTCN PAM
uguccggccuaaucagaauc

SEQ ID NO: 33963 - RNA, 20 nt, Artificial Sequence
  spacer sequence CTCN PAM
uccgauaagccucgccccgu

SEQ ID NO: 33964 - RNA, 20 nt, Artificial Sequence
  spacer sequence CTCN PAM
gauaagccucgccccguucc

SEQ ID NO: 33965 - RNA, 20 nt, Artificial Sequence
  spacer sequence CTCN PAM
ccccguucccgccccuacca

SEQ ID NO: 33966 - RNA, 20 nt, Artificial Sequence
  spacer sequence CTCN PAM
uuugugaucagccccgcccu

SEQ ID NO: 33967 - RNA, 20 nt, Artificial Sequence
  spacer sequence CTCN PAM
acuggucucgccaaugaauc

SEQ ID NO: 33968 - RNA, 20 nt, Artificial Sequence
  spacer sequence CTCN PAM
ccaaugaaucgcgucccguu

SEQ ID NO: 33969 - RNA, 20 nt, Artificial Sequence
  spacer sequence CTCN PAM
aaucggcucggauguuucuu

SEQ ID NO: 33970 - RNA, 20 nt, Artificial Sequence
  spacer sequence CTCN PAM
gauguuucuuuagccccucc

SEQ ID NO: 33971 - RNA, 20 nt, Artificial Sequence
  spacer sequence CTCN PAM
ccccgguuccgcccccccac

SEQ ID NO: 33972 - RNA, 20 nt, Artificial Sequence
  spacer sequence CTCN PAM
ccucgcccuggcuccacccu

SEQ ID NO: 33973 - RNA, 20 nt, Artificial Sequence
  spacer sequence CTCN PAM
ucgcccuggcuccacccuuc

SEQ ID NO: 33974 - RNA, 20 nt, Artificial Sequence
  spacer sequence CTCN PAM
cccuggcuccacccuucagc

SEQ ID NO: 33975 - RNA, 20 nt, Artificial Sequence
  spacer sequence CTCN PAM
acccuucagccaauaauccc

SEQ ID NO: 33976 - RNA, 20 nt, Artificial Sequence
  spacer sequence CTCN PAM
gacaccgcccuuccaaucag

SEQ ID NO: 33977 - RNA, 20 nt, Artificial Sequence
  spacer sequence CTCN PAM
cuccggcccggccaaucggu

SEQ ID NO: 33978 - RNA, 20 nt, Artificial Sequence
  spacer sequence CTCN PAM
ggcccggccaaucggugccc

SEQ ID NO: 33979 - RNA, 20 nt, Artificial Sequence
  spacer sequence CTCN PAM
cccggcggggucugggcagc

SEQ ID NO: 33980 - RNA, 20 nt, Artificial Sequence
  spacer sequence CTCN PAM
cggcggggucugggcagcgg

SEQ ID NO: 33981 - RNA, 20 nt, Artificial Sequence
  spacer sequence CTCN PAM
gccacggccgccgcugccca

SEQ ID NO: 33982 - RNA, 20 nt, Artificial Sequence
  spacer sequence CTCN PAM
cccgccgcauagcccuccgc

SEQ ID NO: 33983 - RNA, 20 nt, Artificial Sequence
  spacer sequence CTCN PAM
uccuuuguccgcccugcccu

SEQ ID NO: 33984 - RNA, 20 nt, Artificial Sequence
  spacer sequence CTCN PAM
uuuguccgcccugcccuccc

SEQ ID NO: 33985 - RNA, 20 nt, Artificial Sequence
  spacer sequence CTCN PAM
cauugguccuagcggggggc

SEQ ID NO: 33986 - RNA, 20 nt, Artificial Sequence
  spacer sequence CTCN PAM
ggccccgcgccgguguccgc

SEQ ID NO: 33987 - RNA, 20 nt, Artificial Sequence
  spacer sequence CTCN PAM
ggcugcgggaaagcggugcg

SEQ ID NO: 33988 - RNA, 20 nt, Artificial Sequence
  spacer sequence CTCN PAM
cccgcggaccagggcaccca

SEQ ID NO: 33989 - RNA, 20 nt, Artificial Sequence
  spacer sequence CTCN PAM
agcagccaaccccgggcgcg

SEQ ID NO: 33990 - RNA, 20 nt, Artificial Sequence
  spacer sequence CTCN PAM
agcucgcccgcggaccaggg

SEQ ID NO: 33991 - RNA, 20 nt, Artificial Sequence
  spacer sequence CTCN PAM
ggccguccauggccccgacg

SEQ ID NO: 33992 - RNA, 20 nt, Artificial Sequence
  spacer sequence CTCN PAM
acgcgcugccucaggccguc

SEQ ID NO: 33993 - RNA, 20 nt, Artificial Sequence
  spacer sequence CTCN PAM
aggaagugcuccacgcgcug

SEQ ID NO: 33994 - RNA, 20 nt, Artificial Sequence
  spacer sequence CTCN PAM
agcgcccccagcacuucggu

SEQ ID NO: 33995 - RNA, 20 nt, Artificial Sequence
  spacer sequence CTCN PAM
accccggucuuggccuccag

SEQ ID NO: 33996 - RNA, 20 nt, Artificial Sequence
  spacer sequence CTCN PAM
ccugcagccagauaccgcuu

SEQ ID NO: 33997 - RNA, 20 nt, Artificial Sequence
  spacer sequence CTCN PAM
gugugcccgucggcgaaacg

SEQ ID NO: 33998 - RNA, 20 nt, Artificial Sequence
  spacer sequence CTCN PAM
uuccccggcuacgggguccg

SEQ ID NO: 33999 - RNA, 20 nt, Artificial Sequence
  spacer sequence CTCN PAM
accggccggaccggaccccg

SEQ ID NO: 34000 - RNA, 20 nt, Artificial Sequence
  spacer sequence CTCN PAM
cgcgcuccaccggccggacc

SEQ ID NO: 34001 - RNA, 20 nt, Artificial Sequence
  spacer sequence CTCN PAM
agguccgcccgcagcccuuc

SEQ ID NO: 34002 - RNA, 20 nt, Artificial Sequence
  spacer sequence CTCN PAM
aggucccagucaccucgcgc

SEQ ID NO: 34003 - RNA, 20 nt, Artificial Sequence
  spacer sequence CTCN PAM
cgggccaccccucucuagcu

SEQ ID NO: 34004 - RNA, 20 nt, Artificial Sequence
  spacer sequence CTCN PAM
cuagcuuccgccccuggccg

SEQ ID NO: 34005 - RNA, 20 nt, Artificial Sequence
  spacer sequence CTCN PAM
agcuuccgccccuggccgcc

SEQ ID NO: 34006 - RNA, 20 nt, Artificial Sequence
  spacer sequence CTCN PAM
uuccgggcgcugggugccug

SEQ ID NO: 34007 - RNA, 20 nt, Artificial Sequence
  spacer sequence CTCN PAM
ggggccacugggcaacugga

SEQ ID NO: 34008 - RNA, 20 nt, Artificial Sequence
  spacer sequence CTCN PAM
acuguugcagccaggccggg

SEQ ID NO: 34009 - RNA, 20 nt, Artificial Sequence
  spacer sequence CTCN PAM
gaaaaacgggaagaucucua

SEQ ID NO: 34010 - RNA, 20 nt, Artificial Sequence
  spacer sequence CTCN PAM
ccucagaaaaacgggaagau

SEQ ID NO: 34011 - RNA, 20 nt, Artificial Sequence
  spacer sequence CTCN PAM
uggcgggaaggggaacggac

SEQ ID NO: 34012 - RNA, 20 nt, Artificial Sequence
  spacer sequence CTCN PAM
uuuccuccuccucuccugcc

SEQ ID NO: 34013 - RNA, 20 nt, Artificial Sequence
  spacer sequence CTCN PAM
uccucuccugcccuagcuca

SEQ ID NO: 34014 - RNA, 20 nt, Artificial Sequence
  spacer sequence CTCN PAM
ucuccugcccuagcucaccu

SEQ ID NO: 34015 - RNA, 20 nt, Artificial Sequence
  spacer sequence CTCN PAM
ccugcccuagcucaccuucc

SEQ ID NO: 34016 - RNA, 20 nt, Artificial Sequence
  spacer sequence CTCN PAM
ugcccuagcucaccuucccc

SEQ ID NO: 34017 - RNA, 20 nt, Artificial Sequence
  spacer sequence CTCN PAM
ccuucccccagcucaauggc

SEQ ID NO: 34018 - RNA, 20 nt, Artificial Sequence
  spacer sequence CTCN PAM
auggcuuagugccaccgagc

SEQ ID NO: 34019 - RNA, 20 nt, Artificial Sequence
  spacer sequence CTCN PAM
guggcacuaagccauugagc

SEQ ID NO: 34020 - RNA, 20 nt, Artificial Sequence
  spacer sequence CTCN PAM
gucuuaacaaacauuuacgc

SEQ ID NO: 34021 - RNA, 20 nt, Artificial Sequence
  spacer sequence CTCN PAM
ccacaucacagccgucagac

SEQ ID NO: 34022 - RNA, 20 nt, Artificial Sequence
  spacer sequence CTCN PAM
gugggccccaguccagccuc

SEQ ID NO: 34023 - RNA, 20 nt, Artificial Sequence
  spacer sequence CTCN PAM
ggcucugugggccccagucc

SEQ ID NO: 34024 - RNA, 20 nt, Artificial Sequence
  spacer sequence CTCN PAM
auuacaguucuuccgugacu

SEQ ID NO: 34025 - RNA, 20 nt, Artificial Sequence
  spacer sequence CTCN PAM
agcaagagcauguaguaaac

SEQ ID NO: 34026 - RNA, 20 nt, Artificial Sequence
  spacer sequence CTCN PAM
ugcuagagauuuggaaaggg

SEQ ID NO: 34027 - RNA, 20 nt, Artificial Sequence
  spacer sequence CTCN PAM
uuaaaugccucccuccccac

SEQ ID NO: 34028 - RNA, 20 nt, Artificial Sequence
  spacer sequence CTCN PAM
cuccccaccuuuaaaacuuu

SEQ ID NO: 34029 - RNA, 20 nt, Artificial Sequence
  spacer sequence CTCN PAM
ccaccuuuaaaacuuuuuuu

SEQ ID NO: 34030 - RNA, 20 nt, Artificial Sequence
  spacer sequence CTCN PAM
aaaaaaaguuuuaaaggugg

SEQ ID NO: 34031 - RNA, 20 nt, Artificial Sequence
  spacer sequence CTCN PAM
gucucaaaaaaaaguuuuaa

SEQ ID NO: 34032 - RNA, 20 nt, Artificial Sequence
  spacer sequence CTCN PAM
gcugcccaggcuggagugca

SEQ ID NO: 34033 - RNA, 20 nt, Artificial Sequence
  spacer sequence CTCN PAM
agccugggcagcagagcaag

SEQ ID NO: 34034 - RNA, 20 nt, Artificial Sequence
  spacer sequence CTCN PAM
cugcaaccuccaccuccugg

SEQ ID NO: 34035 - RNA, 20 nt, Artificial Sequence
  spacer sequence CTCN PAM
accuccuggguucaagcgau

SEQ ID NO: 34036 - RNA, 20 nt, Artificial Sequence
  spacer sequence CTCN PAM
uggguucaagcgauucuccu

SEQ ID NO: 34037 - RNA, 20 nt, Artificial Sequence
  spacer sequence CTCN PAM
ugccucagucuaccaaguag

SEQ ID NO: 34038 - RNA, 20 nt, Artificial Sequence
  spacer sequence CTCN PAM
gucuaccaaguagcugggau

SEQ ID NO: 34039 - RNA, 20 nt, Artificial Sequence
  spacer sequence CTCN PAM
uggccucaggugaucugccc

SEQ ID NO: 34040 - RNA, 20 nt, Artificial Sequence
  spacer sequence CTCN PAM
ggugaucugcccaccucggc

SEQ ID NO: 34041 - RNA, 20 nt, Artificial Sequence
  spacer sequence CTCN PAM
gccucccaaacugcugggau

SEQ ID NO: 34042 - RNA, 20 nt, Artificial Sequence
  spacer sequence CTCN PAM
caaacugcugggauuacagg

SEQ ID NO: 34043 - RNA, 20 nt, Artificial Sequence
  spacer sequence CTCN PAM
ugccuguaaucccagcaguu

SEQ ID NO: 34044 - RNA, 20 nt, Artificial Sequence
  spacer sequence CTCN PAM
uaaaaaaguuaauuuuaaaa

SEQ ID NO: 34045 - RNA, 20 nt, Artificial Sequence
  spacer sequence CTCN PAM
cuauguuacccagacuaguc

SEQ ID NO: 34046 - RNA, 20 nt, Artificial Sequence
  spacer sequence CTCN PAM
agcgauccuccugccucagc

SEQ ID NO: 34047 - RNA, 20 nt, Artificial Sequence
  spacer sequence CTCN PAM
ugccucagccucccaaagcu

SEQ ID NO: 34048 - RNA, 20 nt, Artificial Sequence
  spacer sequence CTCN PAM
gccucccaaagcucugggau

SEQ ID NO: 34049 - RNA, 20 nt, Artificial Sequence
  spacer sequence CTCN PAM
caaagcucugggauuacagg

SEQ ID NO: 34050 - RNA, 20 nt, Artificial Sequence
  spacer sequence CTCN PAM
gggauuacagguggaagcca

SEQ ID NO: 34051 - RNA, 20 nt, Artificial Sequence
  spacer sequence CTCN PAM
cagccccacuggcucugccu

SEQ ID NO: 34052 - RNA, 20 nt, Artificial Sequence
  spacer sequence CTCN PAM
gccuucucuuccaggaagcu

SEQ ID NO: 34053 - RNA, 20 nt, Artificial Sequence
  spacer sequence CTCN PAM
uccaggaagcuccgcagaau

SEQ ID NO: 34054 - RNA, 20 nt, Artificial Sequence
  spacer sequence CTCN PAM
gcagaaugacucacaaggac

SEQ ID NO: 34055 - RNA, 20 nt, Artificial Sequence
  spacer sequence CTCN PAM
caaggacuugcucugggccu

SEQ ID NO: 34056 - RNA, 20 nt, Artificial Sequence
  spacer sequence CTCN PAM
gggccugggguauucugggu

SEQ ID NO: 34057 - RNA, 20 nt, Artificial Sequence
  spacer sequence CTCN PAM
acccagaauaccccaggccc

SEQ ID NO: 34058 - RNA, 20 nt, Artificial Sequence
  spacer sequence CTCN PAM
aaaaaguggcacuguccucu

SEQ ID NO: 34059 - RNA, 20 nt, Artificial Sequence
  spacer sequence CTCN PAM
ugggauccaccugcagaagg

SEQ ID NO: 34060 - RNA, 20 nt, Artificial Sequence
  spacer sequence CTCN PAM
agggugugggcacagacuuc

SEQ ID NO: 34061 - RNA, 20 nt, Artificial Sequence
  spacer sequence CTCN PAM
cgggggcaggcacagccggg

SEQ ID NO: 34062 - RNA, 20 nt, Artificial Sequence
  spacer sequence CTCN PAM
gcccucccuuuccacauccc

SEQ ID NO: 34063 - RNA, 20 nt, Artificial Sequence
  spacer sequence CTCN PAM
cuuuccacaucccuggggcu

SEQ ID NO: 34064 - RNA, 20 nt, Artificial Sequence
  spacer sequence CTCN PAM
acgaccuaaauuccugccca

SEQ ID NO: 34065 - RNA, 20 nt, Artificial Sequence
  spacer sequence CTCN PAM
ugggcgcucuacgaccuaaa

SEQ ID NO: 34066 - RNA, 20 nt, Artificial Sequence
  spacer sequence CTCN PAM
cugcugccugccuccugggc

SEQ ID NO: 34067 - RNA, 20 nt, Artificial Sequence
  spacer sequence CTCN PAM
ggugacacggugccccaggc

SEQ ID NO: 34068 - RNA, 20 nt, Artificial Sequence
  spacer sequence CTCN PAM
guuucgucucuggugacacg

SEQ ID NO: 34069 - RNA, 20 nt, Artificial Sequence
  spacer sequence CTCN PAM
cugugccucaguuucgucuc

SEQ ID NO: 34070 - RNA, 20 nt, Artificial Sequence
  spacer sequence CTCN PAM
gugccuguucugucugaagc

SEQ ID NO: 34071 - RNA, 20 nt, Artificial Sequence
  spacer sequence CTCN PAM
acccugcccacccccagucc

SEQ ID NO: 34072 - RNA, 20 nt, Artificial Sequence
  spacer sequence CTCN PAM
cuccacaguucugaugucca

SEQ ID NO: 34073 - RNA, 20 nt, Artificial Sequence
  spacer sequence CTCN PAM
acaguucugauguccaaggu

SEQ ID NO: 34074 - RNA, 20 nt, Artificial Sequence
  spacer sequence CTCN PAM
cgucgcugaagcugcaggaa

SEQ ID NO: 34075 - RNA, 20 nt, Artificial Sequence
  spacer sequence CTCN PAM
ccuaaaucccuuuuccugca

SEQ ID NO: 34076 - RNA, 20 nt, Artificial Sequence
  spacer sequence CTCN PAM
cagggcgucccuccccuaaa

SEQ ID NO: 34077 - RNA, 20 nt, Artificial Sequence
  spacer sequence CTCN PAM
cccagggcgucccuccccua

SEQ ID NO: 34078 - RNA, 20 nt, Artificial Sequence
  spacer sequence CTCN PAM
ccacgagccaggcccgggga

SEQ ID NO: 34079 - RNA, 20 nt, Artificial Sequence
  spacer sequence CTCN PAM
uggggaggaaugacucuccc

SEQ ID NO: 34080 - RNA, 20 nt, Artificial Sequence
  spacer sequence CTCN PAM
ccgggccuggcucgugggga

SEQ ID NO: 34081 - RNA, 20 nt, Artificial Sequence
  spacer sequence CTCN PAM
ccccgggccuggcucguggg

SEQ ID NO: 34082 - RNA, 20 nt, Artificial Sequence
  spacer sequence CTCN PAM
uccccaucucccaccuccuu

SEQ ID NO: 34083 - RNA, 20 nt, Artificial Sequence
  spacer sequence CTCN PAM
caccuccuuuaaauugacaa

SEQ ID NO: 34084 - RNA, 20 nt, Artificial Sequence
  spacer sequence CTCN PAM
uuuaaauugacaaaucccac

SEQ ID NO: 34085 - RNA, 20 nt, Artificial Sequence
  spacer sequence CTCN PAM
gaggggacagugacugggag

SEQ ID NO: 34086 - RNA, 20 nt, Artificial Sequence
  spacer sequence CTCN PAM
gaguuucuucguauguuacc

SEQ ID NO: 34087 - RNA, 20 nt, Artificial Sequence
  spacer sequence CTCN PAM
cagucacuguccccucugag

SEQ ID NO: 34088 - RNA, 20 nt, Artificial Sequence
  spacer sequence CTCN PAM
ugggaccagcugggggacuc

SEQ ID NO: 34089 - RNA, 20 nt, Artificial Sequence
  spacer sequence CTCN PAM
uccuaccccugaccuugggu

SEQ ID NO: 34090 - RNA, 20 nt, Artificial Sequence
  spacer sequence CTCN PAM
uaccccugaccuugggugcu

SEQ ID NO: 34091 - RNA, 20 nt, Artificial Sequence
  spacer sequence CTCN PAM
caccugcuuuagucuuuauc

SEQ ID NO: 34092 - RNA, 20 nt, Artificial Sequence
  spacer sequence CTCN PAM
gcccuuugguccagaagugg

SEQ ID NO: 34093 - RNA, 20 nt, Artificial Sequence
  spacer sequence CTCN PAM
aucucacucugcagauagca

SEQ ID NO: 34094 - RNA, 20 nt, Artificial Sequence
  spacer sequence CTCN PAM
cucugcagauagcagcccca

SEQ ID NO: 34095 - RNA, 20 nt, Artificial Sequence
  spacer sequence CTCN PAM
gcagauagcagccccagggg

SEQ ID NO: 34096 - RNA, 20 nt, Artificial Sequence
  spacer sequence CTCN PAM
ccuggggcugcuaucugcag

SEQ ID NO: 34097 - RNA, 20 nt, Artificial Sequence
  spacer sequence CTCN PAM
uccccuggggcugcuaucug

SEQ ID NO: 34098 - RNA, 20 nt, Artificial Sequence
  spacer sequence CTCN PAM
cuggagcacauagguucccu

SEQ ID NO: 34099 - RNA, 20 nt, Artificial Sequence
  spacer sequence CTCN PAM
ggagcacauagguucccugu

SEQ ID NO: 34100 - RNA, 20 nt, Artificial Sequence
  spacer sequence CTCN PAM
agagagcuuggacagccuuc

SEQ ID NO: 34101 - RNA, 20 nt, Artificial Sequence
  spacer sequence CTCN PAM
gaaaagaaugacuacgacag

SEQ ID NO: 34102 - RNA, 20 nt, Artificial Sequence
  spacer sequence CTCN PAM
gccccaauccugaaccuggc

SEQ ID NO: 34103 - RNA, 20 nt, Artificial Sequence
  spacer sequence CTCN PAM
gaacacccuccuugcuggga

SEQ ID NO: 34104 - RNA, 20 nt, Artificial Sequence
  spacer sequence CTCN PAM
uugcugggacuguguuauag

SEQ ID NO: 34105 - RNA, 20 nt, Artificial Sequence
  spacer sequence CTCN PAM
cgccuguaaucccagcaguu

SEQ ID NO: 34106 - RNA, 20 nt, Artificial Sequence
  spacer sequence CTCN PAM
caaacugcugggauuacagg

SEQ ID NO: 34107 - RNA, 20 nt, Artificial Sequence
  spacer sequence CTCN PAM
ggugauccgcccgccuuggc

SEQ ID NO: 34108 - RNA, 20 nt, Artificial Sequence
  spacer sequence CTCN PAM
ugaccucaggugauccgccc

SEQ ID NO: 34109 - RNA, 20 nt, Artificial Sequence
  spacer sequence CTCN PAM
aacuccugaccucaggugau

SEQ ID NO: 34110 - RNA, 20 nt, Artificial Sequence
  spacer sequence CTCN PAM
acuaaaaauacaaaaaucag

SEQ ID NO: 34111 - RNA, 20 nt, Artificial Sequence
  spacer sequence CTCN PAM
gcuacucaggagguugaggc

SEQ ID NO: 34112 - RNA, 20 nt, Artificial Sequence
  spacer sequence CTCN PAM
ggagguugaggcaggagaau

SEQ ID NO: 34113 - RNA, 20 nt, Artificial Sequence
  spacer sequence CTCN PAM
ugaguagcugagcguaccac

SEQ ID NO: 34114 - RNA, 20 nt, Artificial Sequence
  spacer sequence CTCN PAM
accuccugaguagcugagcg

SEQ ID NO: 34115 - RNA, 20 nt, Artificial Sequence
  spacer sequence CTCN PAM
ugccucaaccuccugaguag

SEQ ID NO: 34116 - RNA, 20 nt, Artificial Sequence
  spacer sequence CTCN PAM
agugauucuccugccucaac

SEQ ID NO: 34117 - RNA, 20 nt, Artificial Sequence
  spacer sequence CTCN PAM
caggcucaagugauucuccu

SEQ ID NO: 34118 - RNA, 20 nt, Artificial Sequence
  spacer sequence CTCN PAM
ccucccaggcucaagugauu

SEQ ID NO: 34119 - RNA, 20 nt, Artificial Sequence
  spacer sequence CTCN PAM
ggucacuacaagcucgccuc

SEQ ID NO: 34120 - RNA, 20 nt, Artificial Sequence
  spacer sequence CTCN PAM
agccugggugacagagcaag

SEQ ID NO: 34121 - RNA, 20 nt, Artificial Sequence
  spacer sequence CTCN PAM
gucacccaggcuggagugca

SEQ ID NO: 34122 - RNA, 20 nt, Artificial Sequence
  spacer sequence CTCN PAM
aucucgaaaauaaauagaaa

SEQ ID NO: 34123 - RNA, 20 nt, Artificial Sequence
  spacer sequence CTCN PAM
aaaauaaauagaaauaaacg

SEQ ID NO: 34124 - RNA, 20 nt, Artificial Sequence
  spacer sequence CTCN PAM
cuguuaacuuguaaccauag

SEQ ID NO: 34125 - RNA, 20 nt, Artificial Sequence
  spacer sequence CTCN PAM
guuaacuuguaaccauagga

SEQ ID NO: 34126 - RNA, 20 nt, Artificial Sequence
  spacer sequence CTCN PAM
uaugguuacaaguuaacaga

SEQ ID NO: 34127 - RNA, 20 nt, Artificial Sequence
  spacer sequence CTCN PAM
cacuuaccaagggggaaacu

SEQ ID NO: 34128 - RNA, 20 nt, Artificial Sequence
  spacer sequence CTCN PAM
guuucccccuugguaagugg

SEQ ID NO: 34129 - RNA, 20 nt, Artificial Sequence
  spacer sequence CTCN PAM
augcagccacagccucacuc

SEQ ID NO: 34130 - RNA, 20 nt, Artificial Sequence
  spacer sequence CTCN PAM
cucagugccggcuggugagu

SEQ ID NO: 34131 - RNA, 20 nt, Artificial Sequence
  spacer sequence CTCN PAM
gugccggcuggugagugcac

SEQ ID NO: 34132 - RNA, 20 nt, Artificial Sequence
  spacer sequence CTCN PAM
ccagccggcacugagugagg

SEQ ID NO: 34133 - RNA, 20 nt, Artificial Sequence
  spacer sequence CTCN PAM
ccuccacccaggggaucgag

SEQ ID NO: 34134 - RNA, 20 nt, Artificial Sequence
  spacer sequence CTCN PAM
uccacccaggggaucgagau

SEQ ID NO: 34135 - RNA, 20 nt, Artificial Sequence
  spacer sequence CTCN PAM
acccaggggaucgagaugcu

SEQ ID NO: 34136 - RNA, 20 nt, Artificial Sequence
  spacer sequence CTCN PAM
auccccuggguggaggagag

SEQ ID NO: 34137 - RNA, 20 nt, Artificial Sequence
  spacer sequence CTCN PAM
aagacaggagguucucaaag

SEQ ID NO: 34138 - RNA, 20 nt, Artificial Sequence
  spacer sequence CTCN PAM
ugucuuggaggcagcaaacc

SEQ ID NO: 34139 - RNA, 20 nt, Artificial Sequence
  spacer sequence CTCN PAM
aaggggguagcccugccccc

SEQ ID NO: 34140 - RNA, 20 nt, Artificial Sequence
  spacer sequence CTCN PAM
agacaucacccagugucccc

SEQ ID NO: 34141 - RNA, 20 nt, Artificial Sequence
  spacer sequence CTCN PAM
augccaucagcccccaaguc

SEQ ID NO: 34142 - RNA, 20 nt, Artificial Sequence
  spacer sequence CTCN PAM
gcccacuccaugccaucagc

SEQ ID NO: 34143 - RNA, 20 nt, Artificial Sequence
  spacer sequence CTCN PAM
gcacccugcaguguccagga

SEQ ID NO: 34144 - RNA, 20 nt, Artificial Sequence
  spacer sequence CTCN PAM
ccaccgaaaacaaccaagaa

SEQ ID NO: 34145 - RNA, 20 nt, Artificial Sequence
  spacer sequence CTCN PAM
accgaaaacaaccaagaaug

SEQ ID NO: 34146 - RNA, 20 nt, Artificial Sequence
  spacer sequence CTCN PAM
gccuuggcacugcugauguu

SEQ ID NO: 34147 - RNA, 20 nt, Artificial Sequence
  spacer sequence CTCN PAM
gcucuagaaucaagucuuca

SEQ ID NO: 34148 - RNA, 20 nt, Artificial Sequence
  spacer sequence CTCN PAM
agaaucaagucuucaugaca

SEQ ID NO: 34149 - RNA, 20 nt, Artificial Sequence
  spacer sequence CTCN PAM
cuugcagguuucugccaucc

SEQ ID NO: 34150 - RNA, 20 nt, Artificial Sequence
  spacer sequence CTCN PAM
caaagggccuggaaugagau

SEQ ID NO: 34151 - RNA, 20 nt, Artificial Sequence
  spacer sequence CTCN PAM
uuccaggcccuuugggaggc

SEQ ID NO: 34152 - RNA, 20 nt, Artificial Sequence
  spacer sequence CTCN PAM
aaaaaaaaaaaguguaaucu

SEQ ID NO: 34153 - RNA, 20 nt, Artificial Sequence
  spacer sequence CTCN PAM
gucucaaaaaaaaaaaagug

SEQ ID NO: 34154 - RNA, 20 nt, Artificial Sequence
  spacer sequence CTCN PAM
cccaggcuggagugcaacgg

SEQ ID NO: 34155 - RNA, 20 nt, Artificial Sequence
  spacer sequence CTCN PAM
agccugggugaggcuccguc

SEQ ID NO: 34156 - RNA, 20 nt, Artificial Sequence
  spacer sequence CTCN PAM
cugcaagcuccgccuccugg

SEQ ID NO: 34157 - RNA, 20 nt, Artificial Sequence
  spacer sequence CTCN PAM
gccuccuggguuuacgccau

SEQ ID NO: 34158 - RNA, 20 nt, Artificial Sequence
  spacer sequence CTCN PAM
uggguuuacgccauucuccu

SEQ ID NO: 34159 - RNA, 20 nt, Artificial Sequence
  spacer sequence CTCN PAM
ugccucagccuccccagcag

SEQ ID NO: 34160 - RNA, 20 nt, Artificial Sequence
  spacer sequence CTCN PAM
gccuccccagcagcugggac

SEQ ID NO: 34161 - RNA, 20 nt, Artificial Sequence
  spacer sequence CTCN PAM
ccagcagcugggacuacagg

SEQ ID NO: 34162 - RNA, 20 nt, Artificial Sequence
  spacer sequence CTCN PAM
acuaaaaauacaaaagauua

SEQ ID NO: 34163 - RNA, 20 nt, Artificial Sequence
  spacer sequence CTCN PAM
aucuccugaccucgugaucc

SEQ ID NO: 34164 - RNA, 20 nt, Artificial Sequence
  spacer sequence CTCN PAM
ugaccucgugauccaccugc

SEQ ID NO: 34165 - RNA, 20 nt, Artificial Sequence
  spacer sequence CTCN PAM
ugauccaccugccucggccu

SEQ ID NO: 34166 - RNA, 20 nt, Artificial Sequence
  spacer sequence CTCN PAM
gccucccaaagugcuggggu

SEQ ID NO: 34167 - RNA, 20 nt, Artificial Sequence
  spacer sequence CTCN PAM
caaagugcugggguuacagg

SEQ ID NO: 34168 - RNA, 20 nt, Artificial Sequence
  spacer sequence CTCN PAM
caccuguaaccccagcacuu

SEQ ID NO: 34169 - RNA, 20 nt, Artificial Sequence
  spacer sequence CTCN PAM
acgcugggcagugggggugg

SEQ ID NO: 34170 - RNA, 20 nt, Artificial Sequence
  spacer sequence CTCN PAM
ugccugcccuuggggagcuc

SEQ ID NO: 34171 - RNA, 20 nt, Artificial Sequence
  spacer sequence CTCN PAM
ccaagggcaggcaggagcuc

SEQ ID NO: 34172 - RNA, 20 nt, Artificial Sequence
  spacer sequence CTCN PAM
caaccccggugggggacaug

SEQ ID NO: 34173 - RNA, 20 nt, Artificial Sequence
  spacer sequence CTCN PAM
accccggugggggacaugga

SEQ ID NO: 34174 - RNA, 20 nt, Artificial Sequence
  spacer sequence CTCN PAM
gggccuagaggcacgauggg

SEQ ID NO: 34175 - RNA, 20 nt, Artificial Sequence
  spacer sequence CTCN PAM
aggcccugagccuugugccu

SEQ ID NO: 34176 - RNA, 20 nt, Artificial Sequence
  spacer sequence CTCN PAM
aggauauguccacugccccu

SEQ ID NO: 34177 - RNA, 20 nt, Artificial Sequence
  spacer sequence CTCN PAM
ugggaggaggugacgguugc

SEQ ID NO: 34178 - RNA, 20 nt, Artificial Sequence
  spacer sequence CTCN PAM
caggagccgccuccaggaua

SEQ ID NO: 34179 - RNA, 20 nt, Artificial Sequence
  spacer sequence CTCN PAM
ucccaggagccgccuccagg

SEQ ID NO: 34180 - RNA, 20 nt, Artificial Sequence
  spacer sequence CTCN PAM
uaagccuccagcauagcugg

SEQ ID NO: 34181 - RNA, 20 nt, Artificial Sequence
  spacer sequence CTCN PAM
agcgauccugccuccuaagc

SEQ ID NO: 34182 - RNA, 20 nt, Artificial Sequence
  spacer sequence CTCN PAM
ugggcucaagcgauccugcc

SEQ ID NO: 34183 - RNA, 20 nt, Artificial Sequence
  spacer sequence CTCN PAM
cugcauuccuugaccuccug

SEQ ID NO: 34184 - RNA, 20 nt, Artificial Sequence
  spacer sequence CTCN PAM
agccugggugacagaacaag

SEQ ID NO: 34185 - RNA, 20 nt, Artificial Sequence
  spacer sequence CTCN PAM
caaugaauaaaugaaugaau

SEQ ID NO: 34186 - RNA, 20 nt, Artificial Sequence
  spacer sequence CTCN PAM
aucuugcauuugcauucauu

SEQ ID NO: 34187 - RNA, 20 nt, Artificial Sequence
  spacer sequence CTCN PAM
cccagccccugguaaccacu

SEQ ID NO: 34188 - RNA, 20 nt, Artificial Sequence
  spacer sequence CTCN PAM
ccacuuguuacucccccagc

SEQ ID NO: 34189 - RNA, 20 nt, Artificial Sequence
  spacer sequence CTCN PAM
uuagcagucacuccccacuu

SEQ ID NO: 34190 - RNA, 20 nt, Artificial Sequence
  spacer sequence CTCN PAM
guccucauuagcagucacuc

SEQ ID NO: 34191 - RNA, 20 nt, Artificial Sequence
  spacer sequence CTCN PAM
ucacccugaaaagcagcucu

SEQ ID NO: 34192 - RNA, 20 nt, Artificial Sequence
  spacer sequence CTCN PAM
ggccuguaaucccagcacuu

SEQ ID NO: 34193 - RNA, 20 nt, Artificial Sequence
  spacer sequence CTCN PAM
caaagugcugggauuacagg

SEQ ID NO: 34194 - RNA, 20 nt, Artificial Sequence
  spacer sequence CTCN PAM
gccucccaaagugcugggau

SEQ ID NO: 34195 - RNA, 20 nt, Artificial Sequence
  spacer sequence CTCN PAM
ugaccccagcaccucagccu

SEQ ID NO: 34196 - RNA, 20 nt, Artificial Sequence
  spacer sequence CTCN PAM
aacuccugaccccagcaccu

SEQ ID NO: 34197 - RNA, 20 nt, Artificial Sequence
  spacer sequence CTCN PAM
acuaaaaauacaaaaauuag

SEQ ID NO: 34198 - RNA, 20 nt, Artificial Sequence
  spacer sequence CTCN PAM
ggaggcugaggcagaagaau

SEQ ID NO: 34199 - RNA, 20 nt, Artificial Sequence
  spacer sequence CTCN PAM
cgaguagcugggauuacagg

SEQ ID NO: 34200 - RNA, 20 nt, Artificial Sequence
  spacer sequence CTCN PAM
gccucccgaguagcugggau

SEQ ID NO: 34201 - RNA, 20 nt, Artificial Sequence
  spacer sequence CTCN PAM
cggguucaagcgauucuucu

SEQ ID NO: 34202 - RNA, 20 nt, Artificial Sequence
  spacer sequence CTCN PAM
accucccggguucaagcgau

SEQ ID NO: 34203 - RNA, 20 nt, Artificial Sequence
  spacer sequence CTCN PAM
uggcccaggccacagugcag

SEQ ID NO: 34204 - RNA, 20 nt, Artificial Sequence
  spacer sequence CTCN PAM
aucuccaaaaaaaaacccca

SEQ ID NO: 34205 - RNA, 20 nt, Artificial Sequence
  spacer sequence CTCN PAM
aaaaaaaaaccccacugaau

SEQ ID NO: 34206 - RNA, 20 nt, Artificial Sequence
  spacer sequence CTCN PAM
ugccuguaaucccagcacuu

SEQ ID NO: 34207 - RNA, 20 nt, Artificial Sequence
  spacer sequence CTCN PAM
caaagugcugggauuacagg

SEQ ID NO: 34208 - RNA, 20 nt, Artificial Sequence
  spacer sequence CTCN PAM
gccucccaaagugcugggau

SEQ ID NO: 34209 - RNA, 20 nt, Artificial Sequence
  spacer sequence CTCN PAM
agcaguuaacccgccucagc

SEQ ID NO: 34210 - RNA, 20 nt, Artificial Sequence
  spacer sequence CTCN PAM
aauuccuggacucaagcagu

SEQ ID NO: 34211 - RNA, 20 nt, Artificial Sequence
  spacer sequence CTCN PAM
auaaaaauaagccagguaug

SEQ ID NO: 34212 - RNA, 20 nt, Artificial Sequence
  spacer sequence CTCN PAM
caaguagugggaauuacagg

SEQ ID NO: 34213 - RNA, 20 nt, Artificial Sequence
  spacer sequence CTCN PAM
gccucccaaguagugggaau

SEQ ID NO: 34214 - RNA, 20 nt, Artificial Sequence
  spacer sequence CTCN PAM
gcucagccucccaaguagug

SEQ ID NO: 34215 - RNA, 20 nt, Artificial Sequence
  spacer sequence CTCN PAM
cagcucagccucccaaguag

SEQ ID NO: 34216 - RNA, 20 nt, Artificial Sequence
  spacer sequence CTCN PAM
ggcgacccucucagcucagc

SEQ ID NO: 34217 - RNA, 20 nt, Artificial Sequence
  spacer sequence CTCN PAM
caggcucaggcgacccucuc

SEQ ID NO: 34218 - RNA, 20 nt, Artificial Sequence
  spacer sequence CTCN PAM
agccugggugagacccuguc

SEQ ID NO: 34219 - RNA, 20 nt, Artificial Sequence
  spacer sequence CTCN PAM
cccaggcuggagugcagugg

SEQ ID NO: 34220 - RNA, 20 nt, Artificial Sequence
  spacer sequence CTCN PAM
aagaaaaaaaacaaaaaagg

SEQ ID NO: 34221 - RNA, 20 nt, Artificial Sequence
  spacer sequence CTCN PAM
auuuuaaauaaagguuaugc

SEQ ID NO: 34222 - RNA, 20 nt, Artificial Sequence
  spacer sequence CTCN PAM
gggacaucauuuugugucaa

SEQ ID NO: 34223 - RNA, 20 nt, Artificial Sequence
  spacer sequence CTCN PAM
ccccaggcacccccaacaga

SEQ ID NO: 34224 - RNA, 20 nt, Artificial Sequence
  spacer sequence CTCN PAM
ccaggcacccccaacagaaa

SEQ ID NO: 34225 - RNA, 20 nt, Artificial Sequence
  spacer sequence CTCN PAM
cagacugcguuuucuguugg

SEQ ID NO: 34226 - RNA, 20 nt, Artificial Sequence
  spacer sequence CTCN PAM
gaugaagggcuggguugagg

SEQ ID NO: 34227 - RNA, 20 nt, Artificial Sequence
  spacer sequence CTCN PAM
acccagcccuucaucugagg

SEQ ID NO: 34228 - RNA, 20 nt, Artificial Sequence
  spacer sequence CTCN PAM
gcaggucuggggccucaacc

SEQ ID NO: 34229 - RNA, 20 nt, Artificial Sequence
  spacer sequence CTCN PAM
gggcugccuggcuucacccu

SEQ ID NO: 34230 - RNA, 20 nt, Artificial Sequence
  spacer sequence CTCN PAM
gcagagaaaccugaaaucuc

SEQ ID NO: 34231 - RNA, 20 nt, Artificial Sequence
  spacer sequence CTCN PAM
gcagagggugaagccaggca

SEQ ID NO: 34232 - RNA, 20 nt, Artificial Sequence
  spacer sequence CTCN PAM
agccuguagaggagcuucuc

SEQ ID NO: 34233 - RNA, 20 nt, Artificial Sequence
  spacer sequence CTCN PAM
acaggcuagagauuucaggu

SEQ ID NO: 34234 - RNA, 20 nt, Artificial Sequence
  spacer sequence CTCN PAM
ucuacaggcuagagauuuca

SEQ ID NO: 34235 - RNA, 20 nt, Artificial Sequence
  spacer sequence CTCN PAM
cugcuuuucuccacugcuag

SEQ ID NO: 34236 - RNA, 20 nt, Artificial Sequence
  spacer sequence CTCN PAM
acugcuagacccucaugcuc

SEQ ID NO: 34237 - RNA, 20 nt, Artificial Sequence
  spacer sequence CTCN PAM
ugcucagggccagggcccag

SEQ ID NO: 34238 - RNA, 20 nt, Artificial Sequence
  spacer sequence CTCN PAM
gggccagggcccagaguggg

SEQ ID NO: 34239 - RNA, 20 nt, Artificial Sequence
  spacer sequence CTCN PAM
gggcccuggcccugagcaug

SEQ ID NO: 34240 - RNA, 20 nt, Artificial Sequence
  spacer sequence CTCN PAM
uucccacucugggcccuggc

SEQ ID NO: 34241 - RNA, 20 nt, Artificial Sequence
  spacer sequence CTCN PAM
cauucccacucugggcccug

SEQ ID NO: 34242 - RNA, 20 nt, Artificial Sequence
  spacer sequence CTCN PAM
cucauucccacucugggccc

SEQ ID NO: 34243 - RNA, 20 nt, Artificial Sequence
  spacer sequence CTCN PAM
ggauacuccgcucaagcugg

SEQ ID NO: 34244 - RNA, 20 nt, Artificial Sequence
  spacer sequence CTCN PAM
gcucaagcuggccuugguuc

SEQ ID NO: 34245 - RNA, 20 nt, Artificial Sequence
  spacer sequence CTCN PAM
agcuggccuugguucuagcu

SEQ ID NO: 34246 - RNA, 20 nt, Artificial Sequence
  spacer sequence CTCN PAM
caagcugcagccaccucuua

SEQ ID NO: 34247 - RNA, 20 nt, Artificial Sequence
  spacer sequence CTCN PAM
uaggggguuccugcugccug

SEQ ID NO: 34248 - RNA, 20 nt, Artificial Sequence
  spacer sequence CTCN PAM
cccugucacucaaugucacg

SEQ ID NO: 34249 - RNA, 20 nt, Artificial Sequence
  spacer sequence CTCN PAM
cugucacucaaugucacguc

SEQ ID NO: 34250 - RNA, 20 nt, Artificial Sequence
  spacer sequence CTCN PAM
augucacguccucagagaag

SEQ ID NO: 34251 - RNA, 20 nt, Artificial Sequence
  spacer sequence CTCN PAM
gagaagcccucccugacccc

SEQ ID NO: 34252 - RNA, 20 nt, Artificial Sequence
  spacer sequence CTCN PAM
gaggacgugacauugaguga

SEQ ID NO: 34253 - RNA, 20 nt, Artificial Sequence
  spacer sequence CTCN PAM
cugaccccagucucauucag

SEQ ID NO: 34254 - RNA, 20 nt, Artificial Sequence
  spacer sequence CTCN PAM
uucaggccccgucaucugcc

SEQ ID NO: 34255 - RNA, 20 nt, Artificial Sequence
  spacer sequence CTCN PAM
cagauuucagcaugugucac

SEQ ID NO: 34256 - RNA, 20 nt, Artificial Sequence
  spacer sequence CTCN PAM
ggacguguacaggguuccag

SEQ ID NO: 34257 - RNA, 20 nt, Artificial Sequence
  spacer sequence CTCN PAM
uaaggguacacauuugggga

SEQ ID NO: 34258 - RNA, 20 nt, Artificial Sequence
  spacer sequence CTCN PAM
cuugcuguccuccaacuuuc

SEQ ID NO: 34259 - RNA, 20 nt, Artificial Sequence
  spacer sequence CTCN PAM
ugcuguccuccaacuuucca

SEQ ID NO: 34260 - RNA, 20 nt, Artificial Sequence
  spacer sequence CTCN PAM
aacuuuccaggaaccagucc

SEQ ID NO: 34261 - RNA, 20 nt, Artificial Sequence
  spacer sequence CTCN PAM
gggacugguuccuggaaagu

SEQ ID NO: 34262 - RNA, 20 nt, Artificial Sequence
  spacer sequence CTCN PAM
uccugcaggacgaggcccca

SEQ ID NO: 34263 - RNA, 20 nt, Artificial Sequence
  spacer sequence CTCN PAM
ugcaggacgaggccccacac

SEQ ID NO: 34264 - RNA, 20 nt, Artificial Sequence
  spacer sequence CTCN PAM
uccugcaggaggagcucagg

SEQ ID NO: 34265 - RNA, 20 nt, Artificial Sequence
  spacer sequence CTCN PAM
cuuuucucacuuuaucuccc

SEQ ID NO: 34266 - RNA, 20 nt, Artificial Sequence
  spacer sequence CTCN PAM
cuuuaucuccccaaaccggg

SEQ ID NO: 34267 - RNA, 20 nt, Artificial Sequence
  spacer sequence CTCN PAM
ccaaaccgggacagucaaga

SEQ ID NO: 34268 - RNA, 20 nt, Artificial Sequence
  spacer sequence CTCN PAM
gugguucuugacugucccgg

SEQ ID NO: 34269 - RNA, 20 nt, Artificial Sequence
  spacer sequence CTCN PAM
guccacugugcacuucgguc

SEQ ID NO: 34270 - RNA, 20 nt, Artificial Sequence
  spacer sequence CTCN PAM
uuggcucguggaaaccaccc

SEQ ID NO: 34271 - RNA, 20 nt, Artificial Sequence
  spacer sequence CTCN PAM
uggaaaccacccgcccucac

SEQ ID NO: 34272 - RNA, 20 nt, Artificial Sequence
  spacer sequence CTCN PAM
ccugggcggucuccugccca

SEQ ID NO: 34273 - RNA, 20 nt, Artificial Sequence
  spacer sequence CTCN PAM
ugcccacgaccccgagcugu

SEQ ID NO: 34274 - RNA, 20 nt, Artificial Sequence
  spacer sequence CTCN PAM
gggucgugggcaggagaccg

SEQ ID NO: 34275 - RNA, 20 nt, Artificial Sequence
  spacer sequence CTCN PAM
gcacauggcaggcguccucc

SEQ ID NO: 34276 - RNA, 20 nt, Artificial Sequence
  spacer sequence CTCN PAM
gcuuuccccuccugggggac

SEQ ID NO: 34277 - RNA, 20 nt, Artificial Sequence
  spacer sequence CTCN PAM
ugggggaccugaaggcgcca

SEQ ID NO: 34278 - RNA, 20 nt, Artificial Sequence
  spacer sequence CTCN PAM
ccuugguucagugucccgug

SEQ ID NO: 34279 - RNA, 20 nt, Artificial Sequence
  spacer sequence CTCN PAM
ggaaagaugcuuuugauucu

SEQ ID NO: 34280 - RNA, 20 nt, Artificial Sequence
  spacer sequence CTCN PAM
uuuuuuuuuuuuuccuggcu

SEQ ID NO: 34281 - RNA, 20 nt, Artificial Sequence
  spacer sequence CTCN PAM
guggaacaaagacuuagucg

SEQ ID NO: 34282 - RNA, 20 nt, Artificial Sequence
  spacer sequence CTCN PAM
gaaaggucgcagggaacccc

SEQ ID NO: 34283 - RNA, 20 nt, Artificial Sequence
  spacer sequence CTCN PAM
gaaagccuuccaccaccagu

SEQ ID NO: 34284 - RNA, 20 nt, Artificial Sequence
  spacer sequence CTCN PAM
gaaagucgaaagccucaggu

SEQ ID NO: 34285 - RNA, 20 nt, Artificial Sequence
  spacer sequence CTCN PAM
ggucuccacccugagggggc

SEQ ID NO: 34286 - RNA, 20 nt, Artificial Sequence
  spacer sequence CTCN PAM
acccugagggggccacgacc

SEQ ID NO: 34287 - RNA, 20 nt, Artificial Sequence
  spacer sequence CTCN PAM
ggguggagaccugaggcuuu

SEQ ID NO: 34288 - RNA, 20 nt, Artificial Sequence
  spacer sequence CTCN PAM
ugggucguggcccccucagg

SEQ ID NO: 34289 - RNA, 20 nt, Artificial Sequence
  spacer sequence CTCN PAM
gguccucuugggucguggcc

SEQ ID NO: 34290 - RNA, 20 nt, Artificial Sequence
  spacer sequence CTCN PAM
gaaggagucaaggggaauac

SEQ ID NO: 34291 - RNA, 20 nt, Artificial Sequence
  spacer sequence CTCN PAM
uuccgaggccucugguccuc

SEQ ID NO: 34292 - RNA, 20 nt, Artificial Sequence
  spacer sequence CTCN PAM
cacgcagcguugcuuuuuuu

SEQ ID NO: 34293 - RNA, 20 nt, Artificial Sequence
  spacer sequence CTCN PAM
gggugacuggucucccacgc

SEQ ID NO: 34294 - RNA, 20 nt, Artificial Sequence
  spacer sequence CTCN PAM
ccccaguccugggaauaagc

SEQ ID NO: 34295 - RNA, 20 nt, Artificial Sequence
  spacer sequence CTCN PAM
ccgauccgcccaugagcccu

SEQ ID NO: 34296 - RNA, 20 nt, Artificial Sequence
  spacer sequence CTCN PAM
ugggcggaucggggagggcg

SEQ ID NO: 34297 - RNA, 20 nt, Artificial Sequence
  spacer sequence CTCN PAM
ccgaaaucccggcuggccac

SEQ ID NO: 34298 - RNA, 20 nt, Artificial Sequence
  spacer sequence CTCN PAM
ggcuccgcgccaccccagga

SEQ ID NO: 34299 - RNA, 20 nt, Artificial Sequence
  spacer sequence CTCN PAM
gcgccaccccaggagcgccc

SEQ ID NO: 34300 - RNA, 20 nt, Artificial Sequence
  spacer sequence CTCN PAM
ugggguggcgcggagcccga

SEQ ID NO: 34301 - RNA, 20 nt, Artificial Sequence
  spacer sequence CTCN PAM
cgggaaccaaagggacagcc

SEQ ID NO: 34302 - RNA, 20 nt, Artificial Sequence
  spacer sequence CTCN PAM
accccugccccccgguagca

SEQ ID NO: 34303 - RNA, 20 nt, Artificial Sequence
  spacer sequence CTCN PAM
gcgcgccgggcgcacacgca

SEQ ID NO: 34304 - RNA, 20 nt, Artificial Sequence
  spacer sequence CTCN PAM
gcgccccugccccgggccgc

SEQ ID NO: 34305 - RNA, 20 nt, Artificial Sequence
  spacer sequence CTCN PAM
gcggcggccucggcgccccu

SEQ ID NO: 34306 - RNA, 20 nt, Artificial Sequence
  spacer sequence CTCN PAM
cagcggccucugcggcggcc

SEQ ID NO: 34307 - RNA, 20 nt, Artificial Sequence
  spacer sequence CTCN PAM
ucccagcggccucugcggcg

SEQ ID NO: 34308 - RNA, 20 nt, Artificial Sequence
  spacer sequence CTCN PAM
acgggcuccucccagcggcc

SEQ ID NO: 34309 - RNA, 20 nt, Artificial Sequence
  spacer sequence CTCN PAM
uucaccuauaguaaaagaca

SEQ ID NO: 34310 - RNA, 20 nt, Artificial Sequence
  spacer sequence CTCN PAM
cccagcccugcgggagcgcc

SEQ ID NO: 34311 - RNA, 20 nt, Artificial Sequence
  spacer sequence CTCN PAM
cagcccugcgggagcgccgg

SEQ ID NO: 34312 - RNA, 20 nt, Artificial Sequence
  spacer sequence CTCN PAM
cgcagggcugggagagggaa

SEQ ID NO: 34313 - RNA, 20 nt, Artificial Sequence
  spacer sequence CTCN PAM
caccucuuccgcuccauugc

SEQ ID NO: 34314 - RNA, 20 nt, Artificial Sequence
  spacer sequence CTCN PAM
uccgcuccauugcgcccggc

SEQ ID NO: 34315 - RNA, 20 nt, Artificial Sequence
  spacer sequence CTCN PAM
auugcgcccggcuccucggc

SEQ ID NO: 34316 - RNA, 20 nt, Artificial Sequence
  spacer sequence CTCN PAM
ucggcccgccgccgggcccg

SEQ ID NO: 34317 - RNA, 20 nt, Artificial Sequence
  spacer sequence CTCN PAM
gcccgccgccgggcccgccg

SEQ ID NO: 34318 - RNA, 20 nt, Artificial Sequence
  spacer sequence CTCN PAM
ccgccgccgccucagcugcc

SEQ ID NO: 34319 - RNA, 20 nt, Artificial Sequence
  spacer sequence CTCN PAM
gcugccuccgcugccgcugc

SEQ ID NO: 34320 - RNA, 20 nt, Artificial Sequence
  spacer sequence CTCN PAM
gcugccgcugccgccgccgc

SEQ ID NO: 34321 - RNA, 20 nt, Artificial Sequence
  spacer sequence CTCN PAM
gcccccagccgggcgcgcgc

SEQ ID NO: 34322 - RNA, 20 nt, Artificial Sequence
  spacer sequence CTCN PAM
ccgcgcucgccagcccccgc

SEQ ID NO: 34323 - RNA, 20 nt, Artificial Sequence
  spacer sequence CTCN PAM
ccagcccccgcucggggggc

SEQ ID NO: 34324 - RNA, 20 nt, Artificial Sequence
  spacer sequence CTCN PAM
gggggcccgcuccgcccacc

SEQ ID NO: 34325 - RNA, 20 nt, Artificial Sequence
  spacer sequence CTCN PAM
gcccacccgcccgcgcgggg

SEQ ID NO: 34326 - RNA, 20 nt, Artificial Sequence
  spacer sequence CTCN PAM
acggccccgccaaucagcgc

SEQ ID NO: 34327 - RNA, 20 nt, Artificial Sequence
  spacer sequence CTCN PAM
cagcgcgcugauuggcgggg

SEQ ID NO: 34328 - RNA, 20 nt, Artificial Sequence
  spacer sequence CTCN PAM
caaggcacagcgcgcaggcg

SEQ ID NO: 34329 - RNA, 20 nt, Artificial Sequence
  spacer sequence CTCN PAM
gggcacagcugcugggcacu

SEQ ID NO: 34330 - RNA, 20 nt, Artificial Sequence
  spacer sequence CTCN PAM
uuuuacugugcccugucucu

SEQ ID NO: 34331 - RNA, 20 nt, Artificial Sequence
  spacer sequence CTCN PAM
gccggccgccuggugcgcgu

SEQ ID NO: 34332 - RNA, 20 nt, Artificial Sequence
  spacer sequence CTCN PAM
gaccuuucuccagcccaagu

SEQ ID NO: 34333 - RNA, 20 nt, Artificial Sequence
  spacer sequence CTCN PAM
agcccaagucuuggggacuc

SEQ ID NO: 34334 - RNA, 20 nt, Artificial Sequence
  spacer sequence CTCN PAM
ggcccagugacuggaccucg

SEQ ID NO: 34335 - RNA, 20 nt, Artificial Sequence
  spacer sequence CTCN PAM
acuuccccgcccuccugguc

SEQ ID NO: 34336 - RNA, 20 nt, Artificial Sequence
  spacer sequence CTCN PAM
uggucucccagcuuccgagc

SEQ ID NO: 34337 - RNA, 20 nt, Artificial Sequence
  spacer sequence CTCN PAM
cagcuuccgagcuuuuuacg

SEQ ID NO: 34338 - RNA, 20 nt, Artificial Sequence
  spacer sequence CTCN PAM
gaagcugggagaccaggagg

SEQ ID NO: 34339 - RNA, 20 nt, Artificial Sequence
  spacer sequence CTCN PAM
uaaaaagcucggaagcuggg

SEQ ID NO: 34340 - RNA, 20 nt, Artificial Sequence
  spacer sequence CTCN PAM
aguagcuuuuuuuuuuuuga

SEQ ID NO: 34341 - RNA, 20 nt, Artificial Sequence
  spacer sequence CTCN PAM
aaaaaaaaaaagcuacugga

SEQ ID NO: 34342 - RNA, 20 nt, Artificial Sequence
  spacer sequence CTCN PAM
gucacccaggcuggagugca

SEQ ID NO: 34343 - RNA, 20 nt, Artificial Sequence
  spacer sequence CTCN PAM
agccugggugacagagaccc

SEQ ID NO: 34344 - RNA, 20 nt, Artificial Sequence
  spacer sequence CTCN PAM
gcacuccagccugggugaca

SEQ ID NO: 34345 - RNA, 20 nt, Artificial Sequence
  spacer sequence CTCN PAM
cuguagccuccgccucccgg

SEQ ID NO: 34346 - RNA, 20 nt, Artificial Sequence
  spacer sequence CTCN PAM
gccucccggguucaaguugu

SEQ ID NO: 34347 - RNA, 20 nt, Artificial Sequence
  spacer sequence CTCN PAM
cggguucaaguuguuaugcc

SEQ ID NO: 34348 - RNA, 20 nt, Artificial Sequence
  spacer sequence CTCN PAM
gccucccaaguagcugguuc

SEQ ID NO: 34349 - RNA, 20 nt, Artificial Sequence
  spacer sequence CTCN PAM
caaguagcugguuccacgga

SEQ ID NO: 34350 - RNA, 20 nt, Artificial Sequence
  spacer sequence CTCN PAM
acuaaaacuacaaaaauuag

SEQ ID NO: 34351 - RNA, 20 nt, Artificial Sequence
  spacer sequence CTCN PAM
aacuccuuacuucaggugau

SEQ ID NO: 34352 - RNA, 20 nt, Artificial Sequence
  spacer sequence CTCN PAM
uuacuucaggugaucagccc

SEQ ID NO: 34353 - RNA, 20 nt, Artificial Sequence
  spacer sequence CTCN PAM
caaagcgcugggauuacagg

SEQ ID NO: 34354 - RNA, 20 nt, Artificial Sequence
  spacer sequence CTCN PAM
cgccuguaaucccagcgcuu

SEQ ID NO: 34355 - RNA, 20 nt, Artificial Sequence
  spacer sequence CTCN PAM
aaauccaggaaucugagcac

SEQ ID NO: 34356 - RNA, 20 nt, Artificial Sequence
  spacer sequence CTCN PAM
gauuccuggauuuugagggu

SEQ ID NO: 34357 - RNA, 20 nt, Artificial Sequence
  spacer sequence CTCN PAM
ccgaccacccccugcaccuu

SEQ ID NO: 34358 - RNA, 20 nt, Artificial Sequence
  spacer sequence CTCN PAM
ggccgggagaguuccaggac

SEQ ID NO: 34359 - RNA, 20 nt, Artificial Sequence
  spacer sequence CTCN PAM
cggccagagaugguggcugg

SEQ ID NO: 34360 - RNA, 20 nt, Artificial Sequence
  spacer sequence CTCN PAM
cccggccagagaugguggcu

SEQ ID NO: 34361 - RNA, 20 nt, Artificial Sequence
  spacer sequence CTCN PAM
ccuuaaccccuuccccagcc

SEQ ID NO: 34362 - RNA, 20 nt, Artificial Sequence
  spacer sequence CTCN PAM
ggcuggcuggggaagggguu

SEQ ID NO: 34363 - RNA, 20 nt, Artificial Sequence
  spacer sequence CTCN PAM
caaggcuagggcugggcggg

SEQ ID NO: 34364 - RNA, 20 nt, Artificial Sequence
  spacer sequence CTCN PAM
gucgccccggcuggagugca

SEQ ID NO: 34365 - RNA, 20 nt, Artificial Sequence
  spacer sequence CTCN PAM
gucucuaaauaaauaaauga

SEQ ID NO: 34366 - RNA, 20 nt, Artificial Sequence
  spacer sequence CTCN PAM
aaauaaauaaaugaauaaau

SEQ ID NO: 34367 - RNA, 20 nt, Artificial Sequence
  spacer sequence CTCN PAM
cgggugcagcaggucugcuu

SEQ ID NO: 34368 - RNA, 20 nt, Artificial Sequence
  spacer sequence CTCN PAM
gcuaggagcaggcuuccuca

SEQ ID NO: 34369 - RNA, 20 nt, Artificial Sequence
  spacer sequence CTCN PAM
uagcugagaacccaguggcc

SEQ ID NO: 34370 - RNA, 20 nt, Artificial Sequence
  spacer sequence CTCN PAM
ucccaggccugaguuaccca

SEQ ID NO: 34371 - RNA, 20 nt, Artificial Sequence
  spacer sequence CTCN PAM
ggccugggaugaggaagccu

SEQ ID NO: 34372 - RNA, 20 nt, Artificial Sequence
  spacer sequence CTCN PAM
accgugcagacccugucccc

SEQ ID NO: 34373 - RNA, 20 nt, Artificial Sequence
  spacer sequence CTCN PAM
aucccagacugggggacagg

SEQ ID NO: 34374 - RNA, 20 nt, Artificial Sequence
  spacer sequence CTCN PAM
ggaagccagaacauacuucc

SEQ ID NO: 34375 - RNA, 20 nt, Artificial Sequence
  spacer sequence CTCN PAM
guuucuaaaaaagaaaaaag

SEQ ID NO: 34376 - RNA, 20 nt, Artificial Sequence
  spacer sequence CTCN PAM
uguugcccaggcuggaaugc

SEQ ID NO: 34377 - RNA, 20 nt, Artificial Sequence
  spacer sequence CTCN PAM
gcucaccacaaccuccaccu

SEQ ID NO: 34378 - RNA, 20 nt, Artificial Sequence
  spacer sequence CTCN PAM
ccacaaccuccaccucccgg

SEQ ID NO: 34379 - RNA, 20 nt, Artificial Sequence
  spacer sequence CTCN PAM
accucccggguuugagcgau

SEQ ID NO: 34380 - RNA, 20 nt, Artificial Sequence
  spacer sequence CTCN PAM
cggguuugagcgauucuccu

SEQ ID NO: 34381 - RNA, 20 nt, Artificial Sequence
  spacer sequence CTCN PAM
aacccgggagguggagguug

SEQ ID NO: 34382 - RNA, 20 nt, Artificial Sequence
  spacer sequence CTCN PAM
ugccucagccucccaaguag

SEQ ID NO: 34383 - RNA, 20 nt, Artificial Sequence
  spacer sequence CTCN PAM
gccucccaaguagcugggau

SEQ ID NO: 34384 - RNA, 20 nt, Artificial Sequence
  spacer sequence CTCN PAM
caaguagcugggauuacagg

SEQ ID NO: 34385 - RNA, 20 nt, Artificial Sequence
  spacer sequence CTCN PAM
acugaaaauacaaaauuagc

SEQ ID NO: 34386 - RNA, 20 nt, Artificial Sequence
  spacer sequence CTCN PAM
auguuggucagguuggucuc

SEQ ID NO: 34387 - RNA, 20 nt, Artificial Sequence
  spacer sequence CTCN PAM
aacuccugaccucgggugau

SEQ ID NO: 34388 - RNA, 20 nt, Artificial Sequence
  spacer sequence CTCN PAM
ugaccucgggugauucgccc

SEQ ID NO: 34389 - RNA, 20 nt, Artificial Sequence
  spacer sequence CTCN PAM
ggugauucgcccgccuuggc

SEQ ID NO: 34390 - RNA, 20 nt, Artificial Sequence
  spacer sequence CTCN PAM
caaaguguugggauuacagg

SEQ ID NO: 34391 - RNA, 20 nt, Artificial Sequence
  spacer sequence CTCN PAM
cgccuguaaucccaacacuu

SEQ ID NO: 34392 - RNA, 20 nt, Artificial Sequence
  spacer sequence CTCN PAM
aaauuuuuuuguagagauaa

SEQ ID NO: 34393 - RNA, 20 nt, Artificial Sequence
  spacer sequence CTCN PAM
acaaaaaaauuuagagcugc

SEQ ID NO: 34394 - RNA, 20 nt, Artificial Sequence
  spacer sequence CTCN PAM
aauucccaggcucaaacgau

SEQ ID NO: 34395 - RNA, 20 nt, Artificial Sequence
  spacer sequence CTCN PAM
aacgauccucccaccuuagc

SEQ ID NO: 34396 - RNA, 20 nt, Artificial Sequence
  spacer sequence CTCN PAM
caccuuagccuccccaguag

SEQ ID NO: 34397 - RNA, 20 nt, Artificial Sequence
  spacer sequence CTCN PAM
ccaguagcugggacuacaga

SEQ ID NO: 34398 - RNA, 20 nt, Artificial Sequence
  spacer sequence CTCN PAM
acaaaacaaaaaauuaucag

SEQ ID NO: 34399 - RNA, 20 nt, Artificial Sequence
  spacer sequence CTCN PAM
caggcucaagugauucuccu

SEQ ID NO: 34400 - RNA, 20 nt, Artificial Sequence
  spacer sequence CTCN PAM
agugauucuccugccugggc

SEQ ID NO: 34401 - RNA, 20 nt, Artificial Sequence
  spacer sequence CTCN PAM
ugccugggccucccaaagca

SEQ ID NO: 34402 - RNA, 20 nt, Artificial Sequence
  spacer sequence CTCN PAM
caaagcacugggaucacagg

SEQ ID NO: 34403 - RNA, 20 nt, Artificial Sequence
  spacer sequence CTCN PAM
ggccugugaucccagugcuu

SEQ ID NO: 34404 - RNA, 20 nt, Artificial Sequence
  spacer sequence CTCN PAM
uuuugggacacagucucauu

SEQ ID NO: 34405 - RNA, 20 nt, Artificial Sequence
  spacer sequence CTCN PAM
uucugucacccaggcuggag

SEQ ID NO: 34406 - RNA, 20 nt, Artificial Sequence
  spacer sequence CTCN PAM
agccugggugacagaaugag

SEQ ID NO: 34407 - RNA, 20 nt, Artificial Sequence
  spacer sequence CTCN PAM
gcucacugcaaccuccuccu

SEQ ID NO: 34408 - RNA, 20 nt, Artificial Sequence
  spacer sequence CTCN PAM
cugcaaccuccuccucccgg

SEQ ID NO: 34409 - RNA, 20 nt, Artificial Sequence
  spacer sequence CTCN PAM
uccucccggguucaagcgau

SEQ ID NO: 34410 - RNA, 20 nt, Artificial Sequence
  spacer sequence CTCN PAM
ucccggguucaagcgauucu

SEQ ID NO: 34411 - RNA, 20 nt, Artificial Sequence
  spacer sequence CTCN PAM
cggguucaagcgauucuccu

SEQ ID NO: 34412 - RNA, 20 nt, Artificial Sequence
  spacer sequence CTCN PAM
uuccucagccucccgaguag

SEQ ID NO: 34413 - RNA, 20 nt, Artificial Sequence
  spacer sequence CTCN PAM
gccucccgaguagcugggau

SEQ ID NO: 34414 - RNA, 20 nt, Artificial Sequence
  spacer sequence CTCN PAM
cgaguagcugggauuagagg

SEQ ID NO: 34415 - RNA, 20 nt, Artificial Sequence
  spacer sequence CTCN PAM
ggaggcugaggaaggagaau

SEQ ID NO: 34416 - RNA, 20 nt, Artificial Sequence
  spacer sequence CTCN PAM
aaucccagcuacucgggagg

SEQ ID NO: 34417 - RNA, 20 nt, Artificial Sequence
  spacer sequence CTCN PAM
acuaaaaaugcaaaaauuag

SEQ ID NO: 34418 - RNA, 20 nt, Artificial Sequence
  spacer sequence CTCN PAM
aacuccugaccucaggugau

SEQ ID NO: 34419 - RNA, 20 nt, Artificial Sequence
  spacer sequence CTCN PAM
ugaccucaggugauccaccu

SEQ ID NO: 34420 - RNA, 20 nt, Artificial Sequence
  spacer sequence CTCN PAM
ggugauccaccugccucggc

SEQ ID NO: 34421 - RNA, 20 nt, Artificial Sequence
  spacer sequence CTCN PAM
gccucacaaagcgcugggau

SEQ ID NO: 34422 - RNA, 20 nt, Artificial Sequence
  spacer sequence CTCN PAM
caaagcgcugggaucacagg

SEQ ID NO: 34423 - RNA, 20 nt, Artificial Sequence
  spacer sequence CTCN PAM
cgccugugaucccagcgcuu

SEQ ID NO: 34424 - RNA, 20 nt, Artificial Sequence
  spacer sequence CTCN PAM
guaggguugucugguguuuc

SEQ ID NO: 34425 - RNA, 20 nt, Artificial Sequence
  spacer sequence CTCN PAM
ggcgcagcugaagcuuucac

SEQ ID NO: 34426 - RNA, 20 nt, Artificial Sequence
  spacer sequence CTCN PAM
uuguuaaaaaucauaaaaac

SEQ ID NO: 34427 - RNA, 20 nt, Artificial Sequence
  spacer sequence CTCN PAM
cggcaucuucggccuuugcc

SEQ ID NO: 34428 - RNA, 20 nt, Artificial Sequence
  spacer sequence CTCN PAM
gcaccuucugggcgcuuccg

SEQ ID NO: 34429 - RNA, 20 nt, Artificial Sequence
  spacer sequence CTCN PAM
accgggggauccgaauggug

SEQ ID NO: 34430 - RNA, 20 nt, Artificial Sequence
  spacer sequence CTCN PAM
guuuccccaucucuaccggg

SEQ ID NO: 34431 - RNA, 20 nt, Artificial Sequence
  spacer sequence CTCN PAM
aagccucaguuuccccaucu

SEQ ID NO: 34432 - RNA, 20 nt, Artificial Sequence
  spacer sequence CTCN PAM
gcggcuaggccgcuccaagc

SEQ ID NO: 34433 - RNA, 20 nt, Artificial Sequence
  spacer sequence CTCN PAM
gccucucggccucaguuucc

SEQ ID NO: 34434 - RNA, 20 nt, Artificial Sequence
  spacer sequence CTCN PAM
cggccucaguuucccccucu

SEQ ID NO: 34435 - RNA, 20 nt, Artificial Sequence
  spacer sequence CTCN PAM
gccucaguuucccccucugu

SEQ ID NO: 34436 - RNA, 20 nt, Artificial Sequence
  spacer sequence CTCN PAM
guuucccccucugucaccgg

SEQ ID NO: 34437 - RNA, 20 nt, Artificial Sequence
  spacer sequence CTCN PAM
gucaccgggaacaacaaggg

SEQ ID NO: 34438 - RNA, 20 nt, Artificial Sequence
  spacer sequence CTCN PAM
gcccagccccgcgccgcugc

SEQ ID NO: 34439 - RNA, 20 nt, Artificial Sequence
  spacer sequence CTCN PAM
cgccucggcccagccccgcg

SEQ ID NO: 34440 - RNA, 20 nt, Artificial Sequence
  spacer sequence CTCN PAM
ccaguucuugaccagcuccc

SEQ ID NO: 34441 - RNA, 20 nt, Artificial Sequence
  spacer sequence CTCN PAM
cgguagcgugggcccaggaa

SEQ ID NO: 34442 - RNA, 20 nt, Artificial Sequence
  spacer sequence CTCN PAM
gccgcgauggugacccgguu

SEQ ID NO: 34443 - RNA, 20 nt, Artificial Sequence
  spacer sequence CTCN PAM
ggaugacccuguccagcuga

SEQ ID NO: 34444 - RNA, 20 nt, Artificial Sequence
  spacer sequence CTCN PAM
ccgcgcgcgugcgcgccgcg

SEQ ID NO: 34445 - RNA, 20 nt, Artificial Sequence
  spacer sequence CTCN PAM
ccccccccccgcccuccccg

SEQ ID NO: 34446 - RNA, 20 nt, Artificial Sequence
  spacer sequence CTCN PAM
ccggaaguuacuguaagugg

SEQ ID NO: 34447 - RNA, 20 nt, Artificial Sequence
  spacer sequence CTCN PAM
gcggucguccaacccucgcc

SEQ ID NO: 34448 - RNA, 20 nt, Artificial Sequence
  spacer sequence CTCN PAM
ggaccacuucuccgcggucg

SEQ ID NO: 34449 - RNA, 20 nt, Artificial Sequence
  spacer sequence CTCN PAM
gcggggcuaccugccaguga

SEQ ID NO: 34450 - RNA, 20 nt, Artificial Sequence
  spacer sequence CTCN PAM
guuuccuucauuguaaauaa

SEQ ID NO: 34451 - RNA, 20 nt, Artificial Sequence
  spacer sequence CTCN PAM
gagucacacagaggggaaga

SEQ ID NO: 34452 - RNA, 20 nt, Artificial Sequence
  spacer sequence CTCN PAM
gagcaagacccuuccccgcu

SEQ ID NO: 34453 - RNA, 20 nt, Artificial Sequence
  spacer sequence CTCN PAM
gugugacucugagcaagacc

SEQ ID NO: 34454 - RNA, 20 nt, Artificial Sequence
  spacer sequence CTCN PAM
uccccucugugugacucuga

SEQ ID NO: 34455 - RNA, 20 nt, Artificial Sequence
  spacer sequence CTCN PAM
aaucccagcucuuccccucu

SEQ ID NO: 34456 - RNA, 20 nt, Artificial Sequence
  spacer sequence CTCN PAM
aaaagugggcuccaauccca

SEQ ID NO: 34457 - RNA, 20 nt, Artificial Sequence
  spacer sequence CTCN PAM
accaaaguccuacagcgaau

SEQ ID NO: 34458 - RNA, 20 nt, Artificial Sequence
  spacer sequence CTCN PAM
gggaagcacugccgcucgac

SEQ ID NO: 34459 - RNA, 20 nt, Artificial Sequence
  spacer sequence CTCN PAM
gcguugcccguugcuuggag

SEQ ID NO: 34460 - RNA, 20 nt, Artificial Sequence
  spacer sequence CTCN PAM
aagcaacgggcaacgcugag

SEQ ID NO: 34461 - RNA, 20 nt, Artificial Sequence
  spacer sequence CTCN PAM
uugcaggauuccguuugcga

SEQ ID NO: 34462 - RNA, 20 nt, Artificial Sequence
  spacer sequence CTCN PAM
caaacggaauccugcaaaga

SEQ ID NO: 34463 - RNA, 20 nt, Artificial Sequence
  spacer sequence CTCN PAM
uuccggcagcagaggguggc

SEQ ID NO: 34464 - RNA, 20 nt, Artificial Sequence
  spacer sequence CTCN PAM
gcugccggaaugaggaauaa

SEQ ID NO: 34465 - RNA, 20 nt, Artificial Sequence
  spacer sequence CTCN PAM
uugcucggugaacgucucug

SEQ ID NO: 34466 - RNA, 20 nt, Artificial Sequence
  spacer sequence CTCN PAM
gugaacgucucuggaugcuc

SEQ ID NO: 34467 - RNA, 20 nt, Artificial Sequence
  spacer sequence CTCN PAM
ggaugcucuuagcugaugac

SEQ ID NO: 34468 - RNA, 20 nt, Artificial Sequence
  spacer sequence CTCN PAM
uagcugaugacaggcagguc

SEQ ID NO: 34469 - RNA, 20 nt, Artificial Sequence
  spacer sequence CTCN PAM
ugcuuuccaccgcaccaggc

SEQ ID NO: 34470 - RNA, 20 nt, Artificial Sequence
  spacer sequence CTCN PAM
cuugggcucgccuuucucca

SEQ ID NO: 34471 - RNA, 20 nt, Artificial Sequence
  spacer sequence CTCN PAM
ccuuucuccagucccugcuu

SEQ ID NO: 34472 - RNA, 20 nt, Artificial Sequence
  spacer sequence CTCN PAM
agucccugcuuccucugcuc

SEQ ID NO: 34473 - RNA, 20 nt, Artificial Sequence
  spacer sequence CTCN PAM
gcucucccacaacccggcgc

SEQ ID NO: 34474 - RNA, 20 nt, Artificial Sequence
  spacer sequence CTCN PAM
cccacaacccggcgcagcac

SEQ ID NO: 34475 - RNA, 20 nt, Artificial Sequence
  spacer sequence CTCN PAM
cacaacccggcgcagcaccg

SEQ ID NO: 34476 - RNA, 20 nt, Artificial Sequence
  spacer sequence CTCN PAM
cucagcucccagcuuccagc

SEQ ID NO: 34477 - RNA, 20 nt, Artificial Sequence
  spacer sequence CTCN PAM
gcucccagcuuccagccucc

SEQ ID NO: 34478 - RNA, 20 nt, Artificial Sequence
  spacer sequence CTCN PAM
cagcuuccagccuccccccu

SEQ ID NO: 34479 - RNA, 20 nt, Artificial Sequence
  spacer sequence CTCN PAM
ccccugcacaccgggccggu

SEQ ID NO: 34480 - RNA, 20 nt, Artificial Sequence
  spacer sequence CTCN PAM
uccuucugcccacaccggcc

SEQ ID NO: 34481 - RNA, 20 nt, Artificial Sequence
  spacer sequence CTCN PAM
ugaauaugggggaaaaggca

SEQ ID NO: 34482 - RNA, 20 nt, Artificial Sequence
  spacer sequence CTCN PAM
cucaggaagcccuccuggac

SEQ ID NO: 34483 - RNA, 20 nt, Artificial Sequence
  spacer sequence CTCN PAM
ggaagcccuccuggacugcc

SEQ ID NO: 34484 - RNA, 20 nt, Artificial Sequence
  spacer sequence CTCN PAM
uggacugccugacccacagg

SEQ ID NO: 34485 - RNA, 20 nt, Artificial Sequence
  spacer sequence CTCN PAM
cgggcgccagcgucacuugc

SEQ ID NO: 34486 - RNA, 20 nt, Artificial Sequence
  spacer sequence CTCN PAM
ggcgccagcgucacuugcag

SEQ ID NO: 34487 - RNA, 20 nt, Artificial Sequence
  spacer sequence CTCN PAM
ugauaaggaauggacaccgu

SEQ ID NO: 34488 - RNA, 20 nt, Artificial Sequence
  spacer sequence CTCN PAM
uggggucagccccucaguac

SEQ ID NO: 34489 - RNA, 20 nt, Artificial Sequence
  spacer sequence CTCN PAM
guacaccccaagccugcagc

SEQ ID NO: 34490 - RNA, 20 nt, Artificial Sequence
  spacer sequence CTCN PAM
cuggggacugcgggugcuaa

SEQ ID NO: 34491 - RNA, 20 nt, Artificial Sequence
  spacer sequence CTCN PAM
ggggacugcgggugcuaacc

SEQ ID NO: 34492 - RNA, 20 nt, Artificial Sequence
  spacer sequence CTCN PAM
gggugggagccggaaauagg

SEQ ID NO: 34493 - RNA, 20 nt, Artificial Sequence
  spacer sequence CTCN PAM
cacccugaguccuuaaccag

SEQ ID NO: 34494 - RNA, 20 nt, Artificial Sequence
  spacer sequence CTCN PAM
aaaaaaaaaagaaagaaaaa

SEQ ID NO: 34495 - RNA, 20 nt, Artificial Sequence
  spacer sequence CTCN PAM
gucucaaaaaaaaaaagaaa

SEQ ID NO: 34496 - RNA, 20 nt, Artificial Sequence
  spacer sequence CTCN PAM
cucuguggcccaggcuggag

SEQ ID NO: 34497 - RNA, 20 nt, Artificial Sequence
  spacer sequence CTCN PAM
guggcccaggcuggagugca

SEQ ID NO: 34498 - RNA, 20 nt, Artificial Sequence
  spacer sequence CTCN PAM
agccugggccacagagcgag

SEQ ID NO: 34499 - RNA, 20 nt, Artificial Sequence
  spacer sequence CTCN PAM
gcucacugcaaccuccgcuu

SEQ ID NO: 34500 - RNA, 20 nt, Artificial Sequence
  spacer sequence CTCN PAM
cugcaaccuccgcuucccgg

SEQ ID NO: 34501 - RNA, 20 nt, Artificial Sequence
  spacer sequence CTCN PAM
gcuucccggguucaagcuuc

SEQ ID NO: 34502 - RNA, 20 nt, Artificial Sequence
  spacer sequence CTCN PAM
ugccucagccucccaaguag

SEQ ID NO: 34503 - RNA, 20 nt, Artificial Sequence
  spacer sequence CTCN PAM
gccucccaaguagcugggac

SEQ ID NO: 34504 - RNA, 20 nt, Artificial Sequence
  spacer sequence CTCN PAM
caaguagcugggacuacagg

SEQ ID NO: 34505 - RNA, 20 nt, Artificial Sequence
  spacer sequence CTCN PAM
cgccuguagucccagcuacu

SEQ ID NO: 34506 - RNA, 20 nt, Artificial Sequence
  spacer sequence CTCN PAM
acuaaaaauacaaaaacuag

SEQ ID NO: 34507 - RNA, 20 nt, Artificial Sequence
  spacer sequence CTCN PAM
agugauccgccucccaaaau

SEQ ID NO: 34508 - RNA, 20 nt, Artificial Sequence
  spacer sequence CTCN PAM
caaaaugcugggauuacagg

SEQ ID NO: 34509 - RNA, 20 nt, Artificial Sequence
  spacer sequence CTCN PAM
aaaaccccaagccaacugga

SEQ ID NO: 34510 - RNA, 20 nt, Artificial Sequence
  spacer sequence CTCN PAM
gaucccaagcucaaaaaccc

SEQ ID NO: 34511 - RNA, 20 nt, Artificial Sequence
  spacer sequence CTCN PAM
cugaucccaagcucaaaaac

SEQ ID NO: 34512 - RNA, 20 nt, Artificial Sequence
  spacer sequence CTCN PAM
ucccauugguggaaacuuaa

SEQ ID NO: 34513 - RNA, 20 nt, Artificial Sequence
  spacer sequence CTCN PAM
gugucagccccugcauccca

SEQ ID NO: 34514 - RNA, 20 nt, Artificial Sequence
  spacer sequence CTCN PAM
uaauagucucugugucagcc

SEQ ID NO: 34515 - RNA, 20 nt, Artificial Sequence
  spacer sequence CTCN PAM
gggcugacauuccagcagcc

SEQ ID NO: 34516 - RNA, 20 nt, Artificial Sequence
  spacer sequence CTCN PAM
uacauuguggcaucuggaaa

SEQ ID NO: 34517 - RNA, 20 nt, Artificial Sequence
  spacer sequence CTCN PAM
ugggugcuagggguguggga

SEQ ID NO: 34518 - RNA, 20 nt, Artificial Sequence
  spacer sequence CTCN PAM
cucccgcccggcucacccgu

SEQ ID NO: 34519 - RNA, 20 nt, Artificial Sequence
  spacer sequence CTCN PAM
cgcccggcucacccguaccc

SEQ ID NO: 34520 - RNA, 20 nt, Artificial Sequence
  spacer sequence CTCN PAM
cccguacccagaacacuaag

SEQ ID NO: 34521 - RNA, 20 nt, Artificial Sequence
  spacer sequence CTCN PAM
gcggcauuaaccggaaaagc

SEQ ID NO: 34522 - RNA, 20 nt, Artificial Sequence
  spacer sequence CTCN PAM
gcccugccccaaggggcugc

SEQ ID NO: 34523 - RNA, 20 nt, Artificial Sequence
  spacer sequence CTCN PAM
caucggggcuuaagugauca

SEQ ID NO: 34524 - RNA, 20 nt, Artificial Sequence
  spacer sequence CTCN PAM
gauuccagccacuuugauca

SEQ ID NO: 34525 - RNA, 20 nt, Artificial Sequence
  spacer sequence CTCN PAM
gaaagccccuggcucugauu

SEQ ID NO: 34526 - RNA, 20 nt, Artificial Sequence
  spacer sequence CTCN PAM
ucagaaagccccuggcucug

SEQ ID NO: 34527 - RNA, 20 nt, Artificial Sequence
  spacer sequence CTCN PAM
uggcuggcuggggaaggugu

SEQ ID NO: 34528 - RNA, 20 nt, Artificial Sequence
  spacer sequence CTCN PAM
cugguccugcagaaggggaa

SEQ ID NO: 34529 - RNA, 20 nt, Artificial Sequence
  spacer sequence CTCN PAM
guuuccccuucugcaggacc

SEQ ID NO: 34530 - RNA, 20 nt, Artificial Sequence
  spacer sequence CTCN PAM
ccuggcccuggagaggaaga

SEQ ID NO: 34531 - RNA, 20 nt, Artificial Sequence
  spacer sequence CTCN PAM
agggccaggugagaaugcgg

SEQ ID NO: 34532 - RNA, 20 nt, Artificial Sequence
  spacer sequence CTCN PAM
ccagggccaggugagaaugc

SEQ ID NO: 34533 - RNA, 20 nt, Artificial Sequence
  spacer sequence CTCN PAM
cgcaggcuccggugcaccca

SEQ ID NO: 34534 - RNA, 20 nt, Artificial Sequence
  spacer sequence CTCN PAM
ggugcacccagccuccccug

SEQ ID NO: 34535 - RNA, 20 nt, Artificial Sequence
  spacer sequence CTCN PAM
ccuggacccagaccuccaag

SEQ ID NO: 34536 - RNA, 20 nt, Artificial Sequence
  spacer sequence CTCN PAM
aagggccaaccucucauuug

SEQ ID NO: 34537 - RNA, 20 nt, Artificial Sequence
  spacer sequence CTCN PAM
cauuugggaaacaaaggccu

SEQ ID NO: 34538 - RNA, 20 nt, Artificial Sequence
  spacer sequence CTCN PAM
uuugggaaacaaaggccugc

SEQ ID NO: 34539 - RNA, 20 nt, Artificial Sequence
  spacer sequence CTCN PAM
gcaggccucaugagcagccc

SEQ ID NO: 34540 - RNA, 20 nt, Artificial Sequence
  spacer sequence CTCN PAM
ugagcagcccagaacagccc

SEQ ID NO: 34541 - RNA, 20 nt, Artificial Sequence
  spacer sequence CTCN PAM
ugaggccugcagagcccaca

SEQ ID NO: 34542 - RNA, 20 nt, Artificial Sequence
  spacer sequence CTCN PAM
aaggggugcgggggcuguuc

SEQ ID NO: 34543 - RNA, 20 nt, Artificial Sequence
  spacer sequence CTCN PAM
ucugagaaauggaccgaggg

SEQ ID NO: 34544 - RNA, 20 nt, Artificial Sequence
  spacer sequence CTCN PAM
gaagaggaaacugaugcucc

SEQ ID NO: 34545 - RNA, 20 nt, Artificial Sequence
  spacer sequence CTCN PAM
guccauuucucagaagagga

SEQ ID NO: 34546 - RNA, 20 nt, Artificial Sequence
  spacer sequence CTCN PAM
ggcugugugggacgugguga

SEQ ID NO: 34547 - RNA, 20 nt, Artificial Sequence
  spacer sequence CTCN PAM
caugggcuuuuggguuucac

SEQ ID NO: 34548 - RNA, 20 nt, Artificial Sequence
  spacer sequence CTCN PAM
cacgcggcagggccugggga

SEQ ID NO: 34549 - RNA, 20 nt, Artificial Sequence
  spacer sequence CTCN PAM
ccaggcccugccgcgugcga

SEQ ID NO: 34550 - RNA, 20 nt, Artificial Sequence
  spacer sequence CTCN PAM
cuuccaacagccucgguccu

SEQ ID NO: 34551 - RNA, 20 nt, Artificial Sequence
  spacer sequence CTCN PAM
guccuagggacucgcucccc

SEQ ID NO: 34552 - RNA, 20 nt, Artificial Sequence
  spacer sequence CTCN PAM
cucccccuucauuccugaag

SEQ ID NO: 34553 - RNA, 20 nt, Artificial Sequence
  spacer sequence CTCN PAM
cccuucauuccugaagcccc

SEQ ID NO: 34554 - RNA, 20 nt, Artificial Sequence
  spacer sequence CTCN PAM
ggcccagggacugccuggga

SEQ ID NO: 34555 - RNA, 20 nt, Artificial Sequence
  spacer sequence CTCN PAM
cucguauuuauuuggaguuc

SEQ ID NO: 34556 - RNA, 20 nt, Artificial Sequence
  spacer sequence CTCN PAM
uauuuauuuggaguucccug

SEQ ID NO: 34557 - RNA, 20 nt, Artificial Sequence
  spacer sequence CTCN PAM
aaauaaauacgagggagaac

SEQ ID NO: 34558 - RNA, 20 nt, Artificial Sequence
  spacer sequence CTCN PAM
cacuuuauacgcaucugguc

SEQ ID NO: 34559 - RNA, 20 nt, Artificial Sequence
  spacer sequence CTCN PAM
cuuuauacgcaucuggucca

SEQ ID NO: 34560 - RNA, 20 nt, Artificial Sequence
  spacer sequence CTCN PAM
gcaggggcagaaggcaggca

SEQ ID NO: 34561 - RNA, 20 nt, Artificial Sequence
  spacer sequence CTCN PAM
guuccugcaugccugccuuc

SEQ ID NO: 34562 - RNA, 20 nt, Artificial Sequence
  spacer sequence CTCN PAM
gccuccccguccuggccagg

SEQ ID NO: 34563 - RNA, 20 nt, Artificial Sequence
  spacer sequence CTCN PAM
ccguccuggccagggaggug

SEQ ID NO: 34564 - RNA, 20 nt, Artificial Sequence
  spacer sequence CTCN PAM
cuggccaggacggggaggca

SEQ ID NO: 34565 - RNA, 20 nt, Artificial Sequence
  spacer sequence CTCN PAM
accucuggguaaagcccgag

SEQ ID NO: 34566 - RNA, 20 nt, Artificial Sequence
  spacer sequence CTCN PAM
ggguaaagcccgagggggga

SEQ ID NO: 34567 - RNA, 20 nt, Artificial Sequence
  spacer sequence CTCN PAM
ggcuuuacccagagguggag

SEQ ID NO: 34568 - RNA, 20 nt, Artificial Sequence
  spacer sequence CTCN PAM
gggcguccccccucgggcuu

SEQ ID NO: 34569 - RNA, 20 nt, Artificial Sequence
  spacer sequence CTCN PAM
ccgggcguccccccucgggc

SEQ ID NO: 34570 - RNA, 20 nt, Artificial Sequence
  spacer sequence CTCN PAM
ccgcucccagccuguuuccu

SEQ ID NO: 34571 - RNA, 20 nt, Artificial Sequence
  spacer sequence CTCN PAM
cagccuguuuccucaucugg

SEQ ID NO: 34572 - RNA, 20 nt, Artificial Sequence
  spacer sequence CTCN PAM
ucugggaacggcuccgaccc

SEQ ID NO: 34573 - RNA, 20 nt, Artificial Sequence
  spacer sequence CTCN PAM
gacccgggauggggagacgu

SEQ ID NO: 34574 - RNA, 20 nt, Artificial Sequence
  spacer sequence CTCN PAM
ccaucccgggucggagccgu

SEQ ID NO: 34575 - RNA, 20 nt, Artificial Sequence
  spacer sequence CTCN PAM
gcacgucuccccaucccggg

SEQ ID NO: 34576 - RNA, 20 nt, Artificial Sequence
  spacer sequence CTCN PAM
agccacucagcacgucuccc

SEQ ID NO: 34577 - RNA, 20 nt, Artificial Sequence
  spacer sequence CTCN PAM
ccucaagccacucagcacgu

SEQ ID NO: 34578 - RNA, 20 nt, Artificial Sequence
  spacer sequence CTCN PAM
ucaccucaagccacucagca

SEQ ID NO: 34579 - RNA, 20 nt, Artificial Sequence
  spacer sequence CTCN PAM
ccccaaacgcuggucuguuc

SEQ ID NO: 34580 - RNA, 20 nt, Artificial Sequence
  spacer sequence CTCN PAM
gguuacucagccagggaagc

SEQ ID NO: 34581 - RNA, 20 nt, Artificial Sequence
  spacer sequence CTCN PAM
gccagggaagcaaaaauaaa

SEQ ID NO: 34582 - RNA, 20 nt, Artificial Sequence
  spacer sequence CTCN PAM
ggaagggccaugcugguauu

SEQ ID NO: 34583 - RNA, 20 nt, Artificial Sequence
  spacer sequence CTCN PAM
ggcccuugggcuguuuuuuu

SEQ ID NO: 34584 - RNA, 20 nt, Artificial Sequence
  spacer sequence CTCN PAM
guggccugugccucauaggc

SEQ ID NO: 34585 - RNA, 20 nt, Artificial Sequence
  spacer sequence CTCN PAM
uaggcgggaggguuaaauuc

SEQ ID NO: 34586 - RNA, 20 nt, Artificial Sequence
  spacer sequence CTCN PAM
cgccuaugaggcacaggcca

SEQ ID NO: 34587 - RNA, 20 nt, Artificial Sequence
  spacer sequence CTCN PAM
cccaaccuguuucaacccca

SEQ ID NO: 34588 - RNA, 20 nt, Artificial Sequence
  spacer sequence CTCN PAM
ccccccccccccaugcccag

SEQ ID NO: 34589 - RNA, 20 nt, Artificial Sequence
  spacer sequence CTCN PAM
aggaacccauaacacauggc

SEQ ID NO: 34590 - RNA, 20 nt, Artificial Sequence
  spacer sequence CTCN PAM
guuugccugcugguacagug

SEQ ID NO: 34591 - RNA, 20 nt, Artificial Sequence
  spacer sequence CTCN PAM
ggcauuccagccucacugca

SEQ ID NO: 34592 - RNA, 20 nt, Artificial Sequence
  spacer sequence CTCN PAM
cugcaccugccugaacugug

SEQ ID NO: 34593 - RNA, 20 nt, Artificial Sequence
  spacer sequence CTCN PAM
gaagucacacaguucaggca

SEQ ID NO: 34594 - RNA, 20 nt, Artificial Sequence
  spacer sequence CTCN PAM
gagccuccguucacccaggu

SEQ ID NO: 34595 - RNA, 20 nt, Artificial Sequence
  spacer sequence CTCN PAM
gagggugcugguccucagaa

SEQ ID NO: 34596 - RNA, 20 nt, Artificial Sequence
  spacer sequence CTCN PAM
guucacccagguggagaaug

SEQ ID NO: 34597 - RNA, 20 nt, Artificial Sequence
  spacer sequence CTCN PAM
accugggugaacggaggcuc

SEQ ID NO: 34598 - RNA, 20 nt, Artificial Sequence
  spacer sequence CTCN PAM
gaagaagccgccccgcccuc

SEQ ID NO: 34599 - RNA, 20 nt, Artificial Sequence
  spacer sequence CTCN PAM
ccaccgggccugccugcucc

SEQ ID NO: 34600 - RNA, 20 nt, Artificial Sequence
  spacer sequence CTCN PAM
gcagugauaaccguggcagu

SEQ ID NO: 34601 - RNA, 20 nt, Artificial Sequence
  spacer sequence CTCN PAM
guggcccaugaauucccacu

SEQ ID NO: 34602 - RNA, 20 nt, Artificial Sequence
  spacer sequence CTCN PAM
aucccaauccagccuccucc

SEQ ID NO: 34603 - RNA, 20 nt, Artificial Sequence
  spacer sequence CTCN PAM
uccuggcccaagcucggcuu

SEQ ID NO: 34604 - RNA, 20 nt, Artificial Sequence
  spacer sequence CTCN PAM
uggcccaagcucggcuucug

SEQ ID NO: 34605 - RNA, 20 nt, Artificial Sequence
  spacer sequence CTCN PAM
gcuucuggcagcuuaacuuc

SEQ ID NO: 34606 - RNA, 20 nt, Artificial Sequence
  spacer sequence CTCN PAM
gcccaccaggggagucccgu

SEQ ID NO: 34607 - RNA, 20 nt, Artificial Sequence
  spacer sequence CTCN PAM
ccuggugggcagaggaugcg

SEQ ID NO: 34608 - RNA, 20 nt, Artificial Sequence
  spacer sequence CTCN PAM
gugaacagggcagacacaac

SEQ ID NO: 34609 - RNA, 20 nt, Artificial Sequence
  spacer sequence CTCN PAM
gcacugggcacccccuccuu

SEQ ID NO: 34610 - RNA, 20 nt, Artificial Sequence
  spacer sequence CTCN PAM
uuuacuucuuugaggaagga

SEQ ID NO: 34611 - RNA, 20 nt, Artificial Sequence
  spacer sequence CTCN PAM
aagaaguaaaggagggggug

SEQ ID NO: 34612 - RNA, 20 nt, Artificial Sequence
  spacer sequence CTCN PAM
aucgcccaggaaggagugca

SEQ ID NO: 34613 - RNA, 20 nt, Artificial Sequence
  spacer sequence CTCN PAM
uuccugggcgauagaguaag

SEQ ID NO: 34614 - RNA, 20 nt, Artificial Sequence
  spacer sequence CTCN PAM
cugcagccucaaccuccagg

SEQ ID NO: 34615 - RNA, 20 nt, Artificial Sequence
  spacer sequence CTCN PAM
accuccagggcucaagugau

SEQ ID NO: 34616 - RNA, 20 nt, Artificial Sequence
  spacer sequence CTCN PAM
agggcucaagugauucuccu

SEQ ID NO: 34617 - RNA, 20 nt, Artificial Sequence
  spacer sequence CTCN PAM
agugauucuccuugccucag

SEQ ID NO: 34618 - RNA, 20 nt, Artificial Sequence
  spacer sequence CTCN PAM
uugccucagccucccaagua

SEQ ID NO: 34619 - RNA, 20 nt, Artificial Sequence
  spacer sequence CTCN PAM
gccucccaaguagcugggac

SEQ ID NO: 34620 - RNA, 20 nt, Artificial Sequence
  spacer sequence CTCN PAM
caaguagcugggaccacagg

SEQ ID NO: 34621 - RNA, 20 nt, Artificial Sequence
  spacer sequence CTCN PAM
uagcuaauuuuuugaguuuu

SEQ ID NO: 34622 - RNA, 20 nt, Artificial Sequence
  spacer sequence CTCN PAM
aaaaauuagcuaggaguggu

SEQ ID NO: 34623 - RNA, 20 nt, Artificial Sequence
  spacer sequence CTCN PAM
aaaagacaaaacaaaacuca

SEQ ID NO: 34624 - RNA, 20 nt, Artificial Sequence
  spacer sequence CTCN PAM
cuauguuuccugggcuggac

SEQ ID NO: 34625 - RNA, 20 nt, Artificial Sequence
  spacer sequence CTCN PAM
uggccucaagcgauccuccc

SEQ ID NO: 34626 - RNA, 20 nt, Artificial Sequence
  spacer sequence CTCN PAM
agcgauccucccgccucagc

SEQ ID NO: 34627 - RNA, 20 nt, Artificial Sequence
  spacer sequence CTCN PAM
cgccucagccucccaaagug

SEQ ID NO: 34628 - RNA, 20 nt, Artificial Sequence
  spacer sequence CTCN PAM
gccucccaaagugcuggaau

SEQ ID NO: 34629 - RNA, 20 nt, Artificial Sequence
  spacer sequence CTCN PAM
caaagugcuggaaugacagg

SEQ ID NO: 34630 - RNA, 20 nt, Artificial Sequence
  spacer sequence CTCN PAM
cauuuacugaaacagggucu

SEQ ID NO: 34631 - RNA, 20 nt, Artificial Sequence
  spacer sequence CTCN PAM
agggucucacugucaaccag

SEQ ID NO: 34632 - RNA, 20 nt, Artificial Sequence
  spacer sequence CTCN PAM
cugucaaccagacuggagug

SEQ ID NO: 34633 - RNA, 20 nt, Artificial Sequence
  spacer sequence CTCN PAM
agucugguugacagugagac

SEQ ID NO: 34634 - RNA, 20 nt, Artificial Sequence
  spacer sequence CTCN PAM
uuguagauacaaaaauuaaa

SEQ ID NO: 34635 - RNA, 20 nt, Artificial Sequence
  spacer sequence CTCN PAM
ggggcaugguccugggcccc

SEQ ID NO: 34636 - RNA, 20 nt, Artificial Sequence
  spacer sequence CTCN PAM
guuuccccaucuguaaagca

SEQ ID NO: 34637 - RNA, 20 nt, Artificial Sequence
  spacer sequence CTCN PAM
ugccagagagcggcccacuc

SEQ ID NO: 34638 - RNA, 20 nt, Artificial Sequence
  spacer sequence CTCN PAM
ggcaggaggcugacagcgca

SEQ ID NO: 34639 - RNA, 20 nt, Artificial Sequence
  spacer sequence CTCN PAM
cuggcaggaggcugacagcg

SEQ ID NO: 34640 - RNA, 20 nt, Artificial Sequence
  spacer sequence CTCN PAM
cccagccccaccggggccuc

SEQ ID NO: 34641 - RNA, 20 nt, Artificial Sequence
  spacer sequence CTCN PAM
cauccaaacagcugaggcuc

SEQ ID NO: 34642 - RNA, 20 nt, Artificial Sequence
  spacer sequence CTCN PAM
gcuguuuggaugggaggccc

SEQ ID NO: 34643 - RNA, 20 nt, Artificial Sequence
  spacer sequence CTCN PAM
aucgcugaaguauucagcaa

SEQ ID NO: 34644 - RNA, 20 nt, Artificial Sequence
  spacer sequence CTCN PAM
ccccugaaaaccuucccgug

SEQ ID NO: 34645 - RNA, 20 nt, Artificial Sequence
  spacer sequence CTCN PAM
ccugaaaaccuucccgugaa

SEQ ID NO: 34646 - RNA, 20 nt, Artificial Sequence
  spacer sequence CTCN PAM
acaguucacgggaagguuuu

SEQ ID NO: 34647 - RNA, 20 nt, Artificial Sequence
  spacer sequence CTCN PAM
ccaugcugaaguccaggagg

SEQ ID NO: 34648 - RNA, 20 nt, Artificial Sequence
  spacer sequence CTCN PAM
uggacuucagcauggugagc

SEQ ID NO: 34649 - RNA, 20 nt, Artificial Sequence
  spacer sequence CTCN PAM
gugaccuccuggacuucagc

SEQ ID NO: 34650 - RNA, 20 nt, Artificial Sequence
  spacer sequence CTCN PAM
uugucugugcccacaggcgc

SEQ ID NO: 34651 - RNA, 20 nt, Artificial Sequence
  spacer sequence CTCN PAM
gcggcugguucauucuccug

SEQ ID NO: 34652 - RNA, 20 nt, Artificial Sequence
  spacer sequence CTCN PAM
uggggccagggcgggcaccu

SEQ ID NO: 34653 - RNA, 20 nt, Artificial Sequence
  spacer sequence CTCN PAM
ggccuggaaacccugcuugg

SEQ ID NO: 34654 - RNA, 20 nt, Artificial Sequence
  spacer sequence CTCN PAM
cuguccaucuguccccacau

SEQ ID NO: 34655 - RNA, 20 nt, Artificial Sequence
  spacer sequence CTCN PAM
cuguuucucccuguccaucu

SEQ ID NO: 34656 - RNA, 20 nt, Artificial Sequence
  spacer sequence CTCN PAM
ccucccuguuucucccuguc

SEQ ID NO: 34657 - RNA, 20 nt, Artificial Sequence
  spacer sequence CTCN PAM
ucuccccucccuguuucucc

SEQ ID NO: 34658 - RNA, 20 nt, Artificial Sequence
  spacer sequence CTCN PAM
caacucuucuccccucccug

SEQ ID NO: 34659 - RNA, 20 nt, Artificial Sequence
  spacer sequence CTCN PAM
gugcuuugaccacucacaac

SEQ ID NO: 34660 - RNA, 20 nt, Artificial Sequence
  spacer sequence CTCN PAM
accgcccuggggucugaguu

SEQ ID NO: 34661 - RNA, 20 nt, Artificial Sequence
  spacer sequence CTCN PAM
gaccccagggcgguugaggg

SEQ ID NO: 34662 - RNA, 20 nt, Artificial Sequence
  spacer sequence CTCN PAM
gcuggaacucagaccccagg

SEQ ID NO: 34663 - RNA, 20 nt, Artificial Sequence
  spacer sequence CTCN PAM
ccgugcccccagggcucugc

SEQ ID NO: 34664 - RNA, 20 nt, Artificial Sequence
  spacer sequence CTCN PAM
cagggcuccccgugccccca

SEQ ID NO: 34665 - RNA, 20 nt, Artificial Sequence
  spacer sequence CTCN PAM
ggaauuccagcuucccugcg

SEQ ID NO: 34666 - RNA, 20 nt, Artificial Sequence
  spacer sequence CTCN PAM
gcagggaccuagacucugga

SEQ ID NO: 34667 - RNA, 20 nt, Artificial Sequence
  spacer sequence CTCN PAM
ccagagaccacagggagucu

SEQ ID NO: 34668 - RNA, 20 nt, Artificial Sequence
  spacer sequence CTCN PAM
ggggaggacucugcagggac

SEQ ID NO: 34669 - RNA, 20 nt, Artificial Sequence
  spacer sequence CTCN PAM
cuguggucucuggggaggac

SEQ ID NO: 34670 - RNA, 20 nt, Artificial Sequence
  spacer sequence CTCN PAM
ccccauuuuucagacucccu

SEQ ID NO: 34671 - RNA, 20 nt, Artificial Sequence
  spacer sequence CTCN PAM
cuaacucccccagggaacac

SEQ ID NO: 34672 - RNA, 20 nt, Artificial Sequence
  spacer sequence CTCN PAM
cccagggaacaccagggcau

SEQ ID NO: 34673 - RNA, 20 nt, Artificial Sequence
  spacer sequence CTCN PAM
ccuuucuccaacucucucau

SEQ ID NO: 34674 - RNA, 20 nt, Artificial Sequence
  spacer sequence CTCN PAM
uuucuccaacucucucauuu

SEQ ID NO: 34675 - RNA, 20 nt, Artificial Sequence
  spacer sequence CTCN PAM
aacucucucauuuccaacca

SEQ ID NO: 34676 - RNA, 20 nt, Artificial Sequence
  spacer sequence CTCN PAM
cucauuuccaaccaaccccg

SEQ ID NO: 34677 - RNA, 20 nt, Artificial Sequence
  spacer sequence CTCN PAM
cauuuccaaccaaccccggg

SEQ ID NO: 34678 - RNA, 20 nt, Artificial Sequence
  spacer sequence CTCN PAM
uuuccaaccaaccccgggcu

SEQ ID NO: 34679 - RNA, 20 nt, Artificial Sequence
  spacer sequence CTCN PAM
gaggcccccuacccccggga

SEQ ID NO: 34680 - RNA, 20 nt, Artificial Sequence
  spacer sequence CTCN PAM
gaggaagcccgggguugguu

SEQ ID NO: 34681 - RNA, 20 nt, Artificial Sequence
  spacer sequence CTCN PAM
cuuucccggggguagggggc

SEQ ID NO: 34682 - RNA, 20 nt, Artificial Sequence
  spacer sequence CTCN PAM
gggcgggguaggaucgggcu

SEQ ID NO: 34683 - RNA, 20 nt, Artificial Sequence
  spacer sequence CTCN PAM
cccagcagauggcacagccc

SEQ ID NO: 34684 - RNA, 20 nt, Artificial Sequence
  spacer sequence CTCN PAM
uuuacaagcuucaagacuua

SEQ ID NO: 34685 - RNA, 20 nt, Artificial Sequence
  spacer sequence CTCN PAM
acccucaaucucccuccccc

SEQ ID NO: 34686 - RNA, 20 nt, Artificial Sequence
  spacer sequence CTCN PAM
aucucccuccccccaagaaa

SEQ ID NO: 34687 - RNA, 20 nt, Artificial Sequence
  spacer sequence CTCN PAM
cuccccccaagaaaacccca

SEQ ID NO: 34688 - RNA, 20 nt, Artificial Sequence
  spacer sequence CTCN PAM
ccccaagaaaaccccaacag

SEQ ID NO: 34689 - RNA, 20 nt, Artificial Sequence
  spacer sequence CTCN PAM
augagcggggagagcgucuc

SEQ ID NO: 34690 - RNA, 20 nt, Artificial Sequence
  spacer sequence CTCN PAM
uggagggcaggcaagggaug

SEQ ID NO: 34691 - RNA, 20 nt, Artificial Sequence
  spacer sequence CTCN PAM
ccgcucauggagggcaggca

SEQ ID NO: 34692 - RNA, 20 nt, Artificial Sequence
  spacer sequence CTCN PAM
ccccgcucauggagggcagg

SEQ ID NO: 34693 - RNA, 20 nt, Artificial Sequence
  spacer sequence CTCN PAM
agaccagggugcucccgcgu

SEQ ID NO: 34694 - RNA, 20 nt, Artificial Sequence
  spacer sequence CTCN PAM
cgcguggucccagggggcuc

SEQ ID NO: 34695 - RNA, 20 nt, Artificial Sequence
  spacer sequence CTCN PAM
auucuaagaugggggauggg

SEQ ID NO: 34696 - RNA, 20 nt, Artificial Sequence
  spacer sequence CTCN PAM
guaccuuuuucugggggugg

SEQ ID NO: 34697 - RNA, 20 nt, Artificial Sequence
  spacer sequence CTCN PAM
aggccccuccagucucgacu

SEQ ID NO: 34698 - RNA, 20 nt, Artificial Sequence
  spacer sequence CTCN PAM
agucucgacuuuccccaggg

SEQ ID NO: 34699 - RNA, 20 nt, Artificial Sequence
  spacer sequence CTCN PAM
acuuuccccaggggucccca

SEQ ID NO: 34700 - RNA, 20 nt, Artificial Sequence
  spacer sequence CTCN PAM
cgggcugcccccguccccac

SEQ ID NO: 34701 - RNA, 20 nt, Artificial Sequence
  spacer sequence CTCN PAM
gaggcuggggguggggagga

SEQ ID NO: 34702 - RNA, 20 nt, Artificial Sequence
  spacer sequence CTCN PAM
gaggugucucccgggcugcc

SEQ ID NO: 34703 - RNA, 20 nt, Artificial Sequence
  spacer sequence CTCN PAM
ccacccccagccucggaggu

SEQ ID NO: 34704 - RNA, 20 nt, Artificial Sequence
  spacer sequence CTCN PAM
uccccacccccagccucgga

SEQ ID NO: 34705 - RNA, 20 nt, Artificial Sequence
  spacer sequence CTCN PAM
gaggucgagggagacccaac

SEQ ID NO: 34706 - RNA, 20 nt, Artificial Sequence
  spacer sequence CTCN PAM
gaggcuccuccccaccccca

SEQ ID NO: 34707 - RNA, 20 nt, Artificial Sequence
  spacer sequence CTCN PAM
accucggaggcuccucccca

SEQ ID NO: 34708 - RNA, 20 nt, Artificial Sequence
  spacer sequence CTCN PAM
cucgaccucggaggcuccuc

SEQ ID NO: 34709 - RNA, 20 nt, Artificial Sequence
  spacer sequence CTCN PAM
gcuucugaaguugggucucc

SEQ ID NO: 34710 - RNA, 20 nt, Artificial Sequence
  spacer sequence CTCN PAM
uugucugccaacuggaggcc

SEQ ID NO: 34711 - RNA, 20 nt, Artificial Sequence
  spacer sequence CTCN PAM
aguuggcagacaaagagggg

SEQ ID NO: 34712 - RNA, 20 nt, Artificial Sequence
  spacer sequence CTCN PAM
cccgcucaguuuuuuucuuu

SEQ ID NO: 34713 - RNA, 20 nt, Artificial Sequence
  spacer sequence CTCN PAM
guuuuuuucuuuuuuggagg

SEQ ID NO: 34714 - RNA, 20 nt, Artificial Sequence
  spacer sequence CTCN PAM
aaaaaagaaaaaaacugagc

SEQ ID NO: 34715 - RNA, 20 nt, Artificial Sequence
  spacer sequence CTCN PAM
aaaaaagucaguuucacacg

SEQ ID NO: 34716 - RNA, 20 nt, Artificial Sequence
  spacer sequence CTCN PAM
ccacccccccaacuaagucu

SEQ ID NO: 34717 - RNA, 20 nt, Artificial Sequence
  spacer sequence CTCN PAM
cguagaaugcccguuuuagc

SEQ ID NO: 34718 - RNA, 20 nt, Artificial Sequence
  spacer sequence CTCN PAM
aaguccuugggacgccccag

SEQ ID NO: 34719 - RNA, 20 nt, Artificial Sequence
  spacer sequence CTCN PAM
caaaguccuugggacgcccc

SEQ ID NO: 34720 - RNA, 20 nt, Artificial Sequence
  spacer sequence CTCN PAM
aagucucucaaaguccuugg

SEQ ID NO: 34721 - RNA, 20 nt, Artificial Sequence
  spacer sequence CTCN PAM
ccccgggaaaaaggcguucc

SEQ ID NO: 34722 - RNA, 20 nt, Artificial Sequence
  spacer sequence CTCN PAM
ccccgcagccggugcaggcg

SEQ ID NO: 34723 - RNA, 20 nt, Artificial Sequence
  spacer sequence CTCN PAM
cgggccgcaccgccugcacc

SEQ ID NO: 34724 - RNA, 20 nt, Artificial Sequence
  spacer sequence CTCN PAM
cagcgcggccgccgccucgc

SEQ ID NO: 34725 - RNA, 20 nt, Artificial Sequence
  spacer sequence CTCN PAM
ccccgcauuaacgcggagca

SEQ ID NO: 34726 - RNA, 20 nt, Artificial Sequence
  spacer sequence CTCN PAM
gcguuaaugcggggcgaggc

SEQ ID NO: 34727 - RNA, 20 nt, Artificial Sequence
  spacer sequence CTCN PAM
cgcgcgcuccccaccccaaa

SEQ ID NO: 34728 - RNA, 20 nt, Artificial Sequence
  spacer sequence CTCN PAM
ccaccccaaacuccggcgcc

SEQ ID NO: 34729 - RNA, 20 nt, Artificial Sequence
  spacer sequence CTCN PAM
ggcgcccgggccgggccccc

SEQ ID NO: 34730 - RNA, 20 nt, Artificial Sequence
  spacer sequence CTCN PAM
acccgagaaagggggcgccc

SEQ ID NO: 34731 - RNA, 20 nt, Artificial Sequence
  spacer sequence CTCN PAM
gguagaggggggcccggccc

SEQ ID NO: 34732 - RNA, 20 nt, Artificial Sequence
  spacer sequence CTCN PAM
cgccuaaguugcacagcccg

SEQ ID NO: 34733 - RNA, 20 nt, Artificial Sequence
  spacer sequence CTCN PAM
ccaggcccgcgucgcccccg

SEQ ID NO: 34734 - RNA, 20 nt, Artificial Sequence
  spacer sequence CTCN PAM
gggcuccuccacgucgccgc

SEQ ID NO: 34735 - RNA, 20 nt, Artificial Sequence
  spacer sequence CTCN PAM
uccacgucgccgcccccccg

SEQ ID NO: 34736 - RNA, 20 nt, Artificial Sequence
  spacer sequence CTCN PAM
acgucgccgcccccccggcg

SEQ ID NO: 34737 - RNA, 20 nt, Artificial Sequence
  spacer sequence CTCN PAM
aacuucgcgcggcgccgggg

SEQ ID NO: 34738 - RNA, 20 nt, Artificial Sequence
  spacer sequence CTCN PAM
cgggccgcggggcgcccccc

SEQ ID NO: 34739 - RNA, 20 nt, Artificial Sequence
  spacer sequence CTCN PAM
gcgcccccccccaacaagcg

SEQ ID NO: 34740 - RNA, 20 nt, Artificial Sequence
  spacer sequence CTCN PAM
ccugcugggcgcggccgggc

SEQ ID NO: 34741 - RNA, 20 nt, Artificial Sequence
  spacer sequence CTCN PAM
ggggcccggccgcgacgcac

SEQ ID NO: 34742 - RNA, 20 nt, Artificial Sequence
  spacer sequence CTCN PAM
cacccccgcguggcccgucc

SEQ ID NO: 34743 - RNA, 20 nt, Artificial Sequence
  spacer sequence CTCN PAM
ggcccgcuacgcccgcagcc

SEQ ID NO: 34744 - RNA, 20 nt, Artificial Sequence
  spacer sequence CTCN PAM
ucuuccugcggcgggagaca

SEQ ID NO: 34745 - RNA, 20 nt, Artificial Sequence
  spacer sequence CTCN PAM
cgccgcaggaagaugaggca

SEQ ID NO: 34746 - RNA, 20 nt, Artificial Sequence
  spacer sequence CTCN PAM
ggggcggggcaggggcgggg

SEQ ID NO: 34747 - RNA, 20 nt, Artificial Sequence
  spacer sequence CTCN PAM
gccaccuccgggcggcucgg

SEQ ID NO: 34748 - RNA, 20 nt, Artificial Sequence
  spacer sequence CTCN PAM
gggcggcucgggcccgaacg

SEQ ID NO: 34749 - RNA, 20 nt, Artificial Sequence
  spacer sequence CTCN PAM
ggcccgaacgcccuagcucg

SEQ ID NO: 34750 - RNA, 20 nt, Artificial Sequence
  spacer sequence CTCN PAM
gccucucgagcacccucgug

SEQ ID NO: 34751 - RNA, 20 nt, Artificial Sequence
  spacer sequence CTCN PAM
cgagcacccucgugaggacc

SEQ ID NO: 34752 - RNA, 20 nt, Artificial Sequence
  spacer sequence CTCN PAM
agcacccucgugaggacccc

SEQ ID NO: 34753 - RNA, 20 nt, Artificial Sequence
  spacer sequence CTCN PAM
agaggccgagcuagggcguu

SEQ ID NO: 34754 - RNA, 20 nt, Artificial Sequence
  spacer sequence CTCN PAM
ugaggaccccgaaucccgug

SEQ ID NO: 34755 - RNA, 20 nt, Artificial Sequence
  spacer sequence CTCN PAM
cgagggugcucgagaggccg

SEQ ID NO: 34756 - RNA, 20 nt, Artificial Sequence
  spacer sequence CTCN PAM
cgggauucgggguccucacg

SEQ ID NO: 34757 - RNA, 20 nt, Artificial Sequence
  spacer sequence CTCN PAM
ggaccucacgggauucgggg

SEQ ID NO: 34758 - RNA, 20 nt, Artificial Sequence
  spacer sequence CTCN PAM
caggcucuggaccucacggg

SEQ ID NO: 34759 - RNA, 20 nt, Artificial Sequence
  spacer sequence CTCN PAM
gcgcguccccgcucccaggc

SEQ ID NO: 34760 - RNA, 20 nt, Artificial Sequence
  spacer sequence CTCN PAM
ucugcgcguccccgcuccca

SEQ ID NO: 34761 - RNA, 20 nt, Artificial Sequence
  spacer sequence CTCN PAM
ccgcgccguggcccgaccgc

SEQ ID NO: 34762 - RNA, 20 nt, Artificial Sequence
  spacer sequence CTCN PAM
ugugugcuuccgcggacggg

SEQ ID NO: 34763 - RNA, 20 nt, Artificial Sequence
  spacer sequence CTCN PAM
cuugcgucauggacuaagcg

SEQ ID NO: 34764 - RNA, 20 nt, Artificial Sequence
  spacer sequence CTCN PAM
cgggccuuacucgcuugcgu

SEQ ID NO: 34765 - RNA, 20 nt, Artificial Sequence
  spacer sequence CTCN PAM
gccuuagcuuucaaucucac

SEQ ID NO: 34766 - RNA, 20 nt, Artificial Sequence
  spacer sequence CTCN PAM
ccacgaauggcuaggauccc

SEQ ID NO: 34767 - RNA, 20 nt, Artificial Sequence
  spacer sequence CTCN PAM
uuucuucucggccccgcccc

SEQ ID NO: 34768 - RNA, 20 nt, Artificial Sequence
  spacer sequence CTCN PAM
gccccgccccucagcagagg

SEQ ID NO: 34769 - RNA, 20 nt, Artificial Sequence
  spacer sequence CTCN PAM
gcagaggcgggacucugcga

SEQ ID NO: 34770 - RNA, 20 nt, Artificial Sequence
  spacer sequence CTCN PAM
gcugaggggcggggccgaga

SEQ ID NO: 34771 - RNA, 20 nt, Artificial Sequence
  spacer sequence CTCN PAM
gcgagcgagaggccgcgaga

SEQ ID NO: 34772 - RNA, 20 nt, Artificial Sequence
  spacer sequence CTCN PAM
cagagucccgccucugcuga

SEQ ID NO: 34773 - RNA, 20 nt, Artificial Sequence
  spacer sequence CTCN PAM
cucgcagagucccgccucug

SEQ ID NO: 34774 - RNA, 20 nt, Artificial Sequence
  spacer sequence CTCN PAM
cgcucgcagagucccgccuc

SEQ ID NO: 34775 - RNA, 20 nt, Artificial Sequence
  spacer sequence CTCN PAM
cggccucucgcucgcagagu

SEQ ID NO: 34776 - RNA, 20 nt, Artificial Sequence
  spacer sequence CTCN PAM
cgcggccucucgcucgcaga

SEQ ID NO: 34777 - RNA, 20 nt, Artificial Sequence
  spacer sequence CTCN PAM
aggacccaccccggccgccu

SEQ ID NO: 34778 - RNA, 20 nt, Artificial Sequence
  spacer sequence CTCN PAM
gguuggcguggccgcccgcg

SEQ ID NO: 34779 - RNA, 20 nt, Artificial Sequence
  spacer sequence CTCN PAM
gcgcgggcggccacgccaac

SEQ ID NO: 34780 - RNA, 20 nt, Artificial Sequence
  spacer sequence CTCN PAM
ggccggccccgcgugcugag

SEQ ID NO: 34781 - RNA, 20 nt, Artificial Sequence
  spacer sequence CTCN PAM
gcacgcggggccggcccgag

SEQ ID NO: 34782 - RNA, 20 nt, Artificial Sequence
  spacer sequence CTCN PAM
caccacucagcacgcggggc

SEQ ID NO: 34783 - RNA, 20 nt, Artificial Sequence
  spacer sequence CTCN PAM
gggccgugauacccgcucgc

SEQ ID NO: 34784 - RNA, 20 nt, Artificial Sequence
  spacer sequence CTCN PAM
ggcuccggcucugggucaga

SEQ ID NO: 34785 - RNA, 20 nt, Artificial Sequence
  spacer sequence CTCN PAM
ggcucugggucagagagccc

SEQ ID NO: 34786 - RNA, 20 nt, Artificial Sequence
  spacer sequence CTCN PAM
gggucagagagccccgcggg

SEQ ID NO: 34787 - RNA, 20 nt, Artificial Sequence
  spacer sequence CTCN PAM
gacccagagccggagccaga

SEQ ID NO: 34788 - RNA, 20 nt, Artificial Sequence
  spacer sequence CTCN PAM
cugacccagagccggagcca

SEQ ID NO: 34789 - RNA, 20 nt, Artificial Sequence
  spacer sequence CTCN PAM
ccgcggggcucucugaccca

SEQ ID NO: 34790 - RNA, 20 nt, Artificial Sequence
  spacer sequence CTCN PAM
gcggugccuuugccgacuug

SEQ ID NO: 34791 - RNA, 20 nt, Artificial Sequence
  spacer sequence CTCN PAM
agucggcaaaggcaccgcug

SEQ ID NO: 34792 - RNA, 20 nt, Artificial Sequence
  spacer sequence CTCN PAM
gucucggcaucugugaauuu

SEQ ID NO: 34793 - RNA, 20 nt, Artificial Sequence
  spacer sequence CTCN PAM
gcaucugugaauuuggaccu

SEQ ID NO: 34794 - RNA, 20 nt, Artificial Sequence
  spacer sequence CTCN PAM
ggccagaucuggcuuccuga

SEQ ID NO: 34795 - RNA, 20 nt, Artificial Sequence
  spacer sequence CTCN PAM
ugccugugaucccagcgcuu

SEQ ID NO: 34796 - RNA, 20 nt, Artificial Sequence
  spacer sequence CTCN PAM
uucaaagcgcugggaucaca

SEQ ID NO: 34797 - RNA, 20 nt, Artificial Sequence
  spacer sequence CTCN PAM
gccuccuucaaagcgcuggg

SEQ ID NO: 34798 - RNA, 20 nt, Artificial Sequence
  spacer sequence CTCN PAM
agcgaucuucccgccucggc

SEQ ID NO: 34799 - RNA, 20 nt, Artificial Sequence
  spacer sequence CTCN PAM
uggccucaagcgaucuuccc

SEQ ID NO: 34800 - RNA, 20 nt, Artificial Sequence
  spacer sequence CTCN PAM
aacuccuggccucaagcgau

SEQ ID NO: 34801 - RNA, 20 nt, Artificial Sequence
  spacer sequence CTCN PAM
aaaaauauuuaaaauaauuu

SEQ ID NO: 34802 - RNA, 20 nt, Artificial Sequence
  spacer sequence CTCN PAM
caaagugcugggaauacaag

SEQ ID NO: 34803 - RNA, 20 nt, Artificial Sequence
  spacer sequence CTCN PAM
ugacuucaggugaucugccc

SEQ ID NO: 34804 - RNA, 20 nt, Artificial Sequence
  spacer sequence CTCN PAM
aacuccugacuucaggugau

SEQ ID NO: 34805 - RNA, 20 nt, Artificial Sequence
  spacer sequence CTCN PAM
cuggccaacacggugaaacc

SEQ ID NO: 34806 - RNA, 20 nt, Artificial Sequence
  spacer sequence CTCN PAM
ggccaacacggugaaacccc

SEQ ID NO: 34807 - RNA, 20 nt, Artificial Sequence
  spacer sequence CTCN PAM
acuaaaaauacaaaaauuag

SEQ ID NO: 34808 - RNA, 20 nt, Artificial Sequence
  spacer sequence CTCN PAM
ggaggcugaggcagcagaau

SEQ ID NO: 34809 - RNA, 20 nt, Artificial Sequence
  spacer sequence CTCN PAM
cgaguagcuaggacuacagg

SEQ ID NO: 34810 - RNA, 20 nt, Artificial Sequence
  spacer sequence CTCN PAM
gccucccgaguagcuaggac

SEQ ID NO: 34811 - RNA, 20 nt, Artificial Sequence
  spacer sequence CTCN PAM
gccuuucgggugaaagcgau

SEQ ID NO: 34812 - RNA, 20 nt, Artificial Sequence
  spacer sequence CTCN PAM
uugcaaccuccgccuuucgg

SEQ ID NO: 34813 - RNA, 20 nt, Artificial Sequence
  spacer sequence CTCN PAM
gcucauugcaaccuccgccu

SEQ ID NO: 34814 - RNA, 20 nt, Artificial Sequence
  spacer sequence CTCN PAM
cggcucauugcaaccuccgc

SEQ ID NO: 34815 - RNA, 20 nt, Artificial Sequence
  spacer sequence CTCN PAM
agccugggcaacaaggacga

SEQ ID NO: 34816 - RNA, 20 nt, Artificial Sequence
  spacer sequence CTCN PAM
gucucaaaauaaauaaauaa

SEQ ID NO: 34817 - RNA, 20 nt, Artificial Sequence
  spacer sequence CTCN PAM
aaauaaauaaauaaauaagu

SEQ ID NO: 34818 - RNA, 20 nt, Artificial Sequence
  spacer sequence CTCN PAM
gcuacucgggaagcugaggc

SEQ ID NO: 34819 - RNA, 20 nt, Artificial Sequence
  spacer sequence CTCN PAM
ggaagcugaggcaggagaau

SEQ ID NO: 34820 - RNA, 20 nt, Artificial Sequence
  spacer sequence CTCN PAM
gcuucccgaguagcugagau

SEQ ID NO: 34821 - RNA, 20 nt, Artificial Sequence
  spacer sequence CTCN PAM
ugccucagcuucccgaguag

SEQ ID NO: 34822 - RNA, 20 nt, Artificial Sequence
  spacer sequence CTCN PAM
uggguuuaagcgauucuccu

SEQ ID NO: 34823 - RNA, 20 nt, Artificial Sequence
  spacer sequence CTCN PAM
gccuccuggguuuaagcgau

SEQ ID NO: 34824 - RNA, 20 nt, Artificial Sequence
  spacer sequence CTCN PAM
cugcaaccucugccuccugg

SEQ ID NO: 34825 - RNA, 20 nt, Artificial Sequence
  spacer sequence CTCN PAM
gcucacugcaaccucugccu

SEQ ID NO: 34826 - RNA, 20 nt, Artificial Sequence
  spacer sequence CTCN PAM
aggcugggcgacagaacgag

SEQ ID NO: 34827 - RNA, 20 nt, Artificial Sequence
  spacer sequence CTCN PAM
uucugucgcccagccuggag

SEQ ID NO: 34828 - RNA, 20 nt, Artificial Sequence
  spacer sequence CTCN PAM
gucucaaaaaaaaaaguaaa

SEQ ID NO: 34829 - RNA, 20 nt, Artificial Sequence
  spacer sequence CTCN PAM
aaaaaaaaaguaaaauaacu

SEQ ID NO: 34830 - RNA, 20 nt, Artificial Sequence
  spacer sequence CTCN PAM
cagggcucccuggggcccca

SEQ ID NO: 34831 - RNA, 20 nt, Artificial Sequence
  spacer sequence CTCN PAM
cuggggccccaaagggaaau

SEQ ID NO: 34832 - RNA, 20 nt, Artificial Sequence
  spacer sequence CTCN PAM
acucccagccugggaagaug

SEQ ID NO: 34833 - RNA, 20 nt, Artificial Sequence
  spacer sequence CTCN PAM
cagccugggaagaugccacc

SEQ ID NO: 34834 - RNA, 20 nt, Artificial Sequence
  spacer sequence CTCN PAM
cuggcccgcuuggcuccagc

SEQ ID NO: 34835 - RNA, 20 nt, Artificial Sequence
  spacer sequence CTCN PAM
agccauccugcccucuggau

SEQ ID NO: 34836 - RNA, 20 nt, Artificial Sequence
  spacer sequence CTCN PAM
ggaugguccagaacuugcua

SEQ ID NO: 34837 - RNA, 20 nt, Artificial Sequence
  spacer sequence CTCN PAM
uccccaccccgggccucuac

SEQ ID NO: 34838 - RNA, 20 nt, Artificial Sequence
  spacer sequence CTCN PAM
acguuugcuuuguccucuac

SEQ ID NO: 34839 - RNA, 20 nt, Artificial Sequence
  spacer sequence CTCN PAM
accugggaggcuuuucccac

SEQ ID NO: 34840 - RNA, 20 nt, Artificial Sequence
  spacer sequence CTCN PAM
cagguagaggacaaagcaaa

SEQ ID NO: 34841 - RNA, 20 nt, Artificial Sequence
  spacer sequence CTCN PAM
agauaggggugggaaaagcc

SEQ ID NO: 34842 - RNA, 20 nt, Artificial Sequence
  spacer sequence CTCN PAM
ggggcuccagauaggggugg

SEQ ID NO: 34843 - RNA, 20 nt, Artificial Sequence
  spacer sequence CTCN PAM
ccgccggccuggcauaggug

SEQ ID NO: 34844 - RNA, 20 nt, Artificial Sequence
  spacer sequence CTCN PAM
ugcuauacacccaaacuggg

SEQ ID NO: 34845 - RNA, 20 nt, Artificial Sequence
  spacer sequence CTCN PAM
gugcccagagaguuccacgu

SEQ ID NO: 34846 - RNA, 20 nt, Artificial Sequence
  spacer sequence CTCN PAM
gggcacggagggucggacug

SEQ ID NO: 34847 - RNA, 20 nt, Artificial Sequence
  spacer sequence CTCN PAM
cugggcacggagggucggac

SEQ ID NO: 34848 - RNA, 20 nt, Artificial Sequence
  spacer sequence CTCN PAM
ccagaccugcggcacgugga

SEQ ID NO: 34849 - RNA, 20 nt, Artificial Sequence
  spacer sequence CTCN PAM
ccccagaccugcggcacgug

SEQ ID NO: 34850 - RNA, 20 nt, Artificial Sequence
  spacer sequence CTCN PAM
ucccucuccaccucacugug

SEQ ID NO: 34851 - RNA, 20 nt, Artificial Sequence
  spacer sequence CTCN PAM
ccaccucacugugaccucag

SEQ ID NO: 34852 - RNA, 20 nt, Artificial Sequence
  spacer sequence CTCN PAM
accucacugugaccucaggc

SEQ ID NO: 34853 - RNA, 20 nt, Artificial Sequence
  spacer sequence CTCN PAM
cugugaccucaggcaaguuc

SEQ ID NO: 34854 - RNA, 20 nt, Artificial Sequence
  spacer sequence CTCN PAM
ggcaaguucgugcuacucuc

SEQ ID NO: 34855 - RNA, 20 nt, Artificial Sequence
  spacer sequence CTCN PAM
ccgggccucgguuucuccau

SEQ ID NO: 34856 - RNA, 20 nt, Artificial Sequence
  spacer sequence CTCN PAM
gggccucgguuucuccaucu

SEQ ID NO: 34857 - RNA, 20 nt, Artificial Sequence
  spacer sequence CTCN PAM
guuucuccaucuggacagug

SEQ ID NO: 34858 - RNA, 20 nt, Artificial Sequence
  spacer sequence CTCN PAM
aucuggacaguggaaggggg

SEQ ID NO: 34859 - RNA, 20 nt, Artificial Sequence
  spacer sequence CTCN PAM
acuaaaaauacaaaaaauua

SEQ ID NO: 34860 - RNA, 20 nt, Artificial Sequence
  spacer sequence CTCN PAM
aucuccugaccucgugaucu

SEQ ID NO: 34861 - RNA, 20 nt, Artificial Sequence
  spacer sequence CTCN PAM
ugaccucgugaucugcucgc

SEQ ID NO: 34862 - RNA, 20 nt, Artificial Sequence
  spacer sequence CTCN PAM
ugaucugcucgccucggccu

SEQ ID NO: 34863 - RNA, 20 nt, Artificial Sequence
  spacer sequence CTCN PAM
ccucggccucccaaagugcu

SEQ ID NO: 34864 - RNA, 20 nt, Artificial Sequence
  spacer sequence CTCN PAM
gccucccaaagugcugggau

SEQ ID NO: 34865 - RNA, 20 nt, Artificial Sequence
  spacer sequence CTCN PAM
caaagugcugggauuacagg

SEQ ID NO: 34866 - RNA, 20 nt, Artificial Sequence
  spacer sequence CTCN PAM
cgccuguaaucccagcacuu

SEQ ID NO: 34867 - RNA, 20 nt, Artificial Sequence
  spacer sequence CTCN PAM
gggucggccgggcacggcgg

SEQ ID NO: 34868 - RNA, 20 nt, Artificial Sequence
  spacer sequence CTCN PAM
gaggacuccacugcccucca

SEQ ID NO: 34869 - RNA, 20 nt, Artificial Sequence
  spacer sequence CTCN PAM
gagacaaaauaaagcucagg

SEQ ID NO: 34870 - RNA, 20 nt, Artificial Sequence
  spacer sequence CTCN PAM
acugcccuccauguccggcc

SEQ ID NO: 34871 - RNA, 20 nt, Artificial Sequence
  spacer sequence CTCN PAM
auguccggccucccgagccc

SEQ ID NO: 34872 - RNA, 20 nt, Artificial Sequence
  spacer sequence CTCN PAM
cgagcccccucugcccaccu

SEQ ID NO: 34873 - RNA, 20 nt, Artificial Sequence
  spacer sequence CTCN PAM
ggaggccggacauggagggc

SEQ ID NO: 34874 - RNA, 20 nt, Artificial Sequence
  spacer sequence CTCN PAM
gcccaccucccuccagcugc

SEQ ID NO: 34875 - RNA, 20 nt, Artificial Sequence
  spacer sequence CTCN PAM
cuccagcugcgcuggccacc

SEQ ID NO: 34876 - RNA, 20 nt, Artificial Sequence
  spacer sequence CTCN PAM
agcugcgcuggccaccuccu

SEQ ID NO: 34877 - RNA, 20 nt, Artificial Sequence
  spacer sequence CTCN PAM
ucgcugcugcuuggacaccg

SEQ ID NO: 34878 - RNA, 20 nt, Artificial Sequence
  spacer sequence CTCN PAM
cugcugcuuggacaccguuu

SEQ ID NO: 34879 - RNA, 20 nt, Artificial Sequence
  spacer sequence CTCN PAM
cugugaccucagggucugug

SEQ ID NO: 34880 - RNA, 20 nt, Artificial Sequence
  spacer sequence CTCN PAM
gggucugugcccaggauguc

SEQ ID NO: 34881 - RNA, 20 nt, Artificial Sequence
  spacer sequence CTCN PAM
gccgggagccguuccucccc

SEQ ID NO: 34882 - RNA, 20 nt, Artificial Sequence
  spacer sequence CTCN PAM
cggccgagggacauccuggg

SEQ ID NO: 34883 - RNA, 20 nt, Artificial Sequence
  spacer sequence CTCN PAM
ccacucucaggccccuuugc

SEQ ID NO: 34884 - RNA, 20 nt, Artificial Sequence
  spacer sequence CTCN PAM
caggccccuuugccggugua

SEQ ID NO: 34885 - RNA, 20 nt, Artificial Sequence
  spacer sequence CTCN PAM
ggccccuuugccgguguauc

SEQ ID NO: 34886 - RNA, 20 nt, Artificial Sequence
  spacer sequence CTCN PAM
cacucucaggccccuguuuc

SEQ ID NO: 34887 - RNA, 20 nt, Artificial Sequence
  spacer sequence CTCN PAM
caggccccuguuucuccccc

SEQ ID NO: 34888 - RNA, 20 nt, Artificial Sequence
  spacer sequence CTCN PAM
ggccccuguuucucccccuu

SEQ ID NO: 34889 - RNA, 20 nt, Artificial Sequence
  spacer sequence CTCN PAM
cccuugcgccuguggggcuu

SEQ ID NO: 34890 - RNA, 20 nt, Artificial Sequence
  spacer sequence CTCN PAM
guaaggggagccccgggccc

SEQ ID NO: 34891 - RNA, 20 nt, Artificial Sequence
  spacer sequence CTCN PAM
ccuuacagagccaggcaagc

SEQ ID NO: 34892 - RNA, 20 nt, Artificial Sequence
  spacer sequence CTCN PAM
agcauccaucuggggccuga

SEQ ID NO: 34893 - RNA, 20 nt, Artificial Sequence
  spacer sequence CTCN PAM
auaaaugcacaggcuaaguu

SEQ ID NO: 34894 - RNA, 20 nt, Artificial Sequence
  spacer sequence CTCN PAM
ccuguaagauggggaacccc

SEQ ID NO: 34895 - RNA, 20 nt, Artificial Sequence
  spacer sequence CTCN PAM
guuuccucaccuguaagaug

SEQ ID NO: 34896 - RNA, 20 nt, Artificial Sequence
  spacer sequence CTCN PAM
gaagagggcggccugacagg

SEQ ID NO: 34897 - RNA, 20 nt, Artificial Sequence
  spacer sequence CTCN PAM
ucggagccucaguuuccuca

SEQ ID NO: 34898 - RNA, 20 nt, Artificial Sequence
  spacer sequence CTCN PAM
cagaugccugucaggccgcc

SEQ ID NO: 34899 - RNA, 20 nt, Artificial Sequence
  spacer sequence CTCN PAM
uggcccagggcgccgugggg

SEQ ID NO: 34900 - RNA, 20 nt, Artificial Sequence
  spacer sequence CTCN PAM
ggcagugggggagggugggc

SEQ ID NO: 34901 - RNA, 20 nt, Artificial Sequence
  spacer sequence CTCN PAM
cccacugccagagccccagc

SEQ ID NO: 34902 - RNA, 20 nt, Artificial Sequence
  spacer sequence CTCN PAM
cgcccacccucccccacugc

SEQ ID NO: 34903 - RNA, 20 nt, Artificial Sequence
  spacer sequence CTCN PAM
agcuggccuggggccagcca

SEQ ID NO: 34904 - RNA, 20 nt, Artificial Sequence
  spacer sequence CTCN PAM
gcacaggcuccagcuggccu

SEQ ID NO: 34905 - RNA, 20 nt, Artificial Sequence
  spacer sequence CTCN PAM
cucugcacaggcuccagcug

SEQ ID NO: 34906 - RNA, 20 nt, Artificial Sequence
  spacer sequence CTCN PAM
cgcugccucuggguccccuu

SEQ ID NO: 34907 - RNA, 20 nt, Artificial Sequence
  spacer sequence CTCN PAM
ggguccccuucugagucccc

SEQ ID NO: 34908 - RNA, 20 nt, Artificial Sequence
  spacer sequence CTCN PAM
gaaggggacccagaggcagc

SEQ ID NO: 34909 - RNA, 20 nt, Artificial Sequence
  spacer sequence CTCN PAM
gccuuucucgguuggucucc

SEQ ID NO: 34910 - RNA, 20 nt, Artificial Sequence
  spacer sequence CTCN PAM
guuggucuccaucucugucu

SEQ ID NO: 34911 - RNA, 20 nt, Artificial Sequence
  spacer sequence CTCN PAM
aucucugucuuugucucucu

SEQ ID NO: 34912 - RNA, 20 nt, Artificial Sequence
  spacer sequence CTCN PAM
gucuuugucucucugucucu

SEQ ID NO: 34913 - RNA, 20 nt, Artificial Sequence
  spacer sequence CTCN PAM
cugucucugucucuuucugu

SEQ ID NO: 34914 - RNA, 20 nt, Artificial Sequence
  spacer sequence CTCN PAM
gucucugucucuuucugucu

SEQ ID NO: 34915 - RNA, 20 nt, Artificial Sequence
  spacer sequence CTCN PAM
gucucuuucugucuguuucu

SEQ ID NO: 34916 - RNA, 20 nt, Artificial Sequence
  spacer sequence CTCN PAM
uucugucuguuucucucugu

SEQ ID NO: 34917 - RNA, 20 nt, Artificial Sequence
  spacer sequence CTCN PAM
cugucuucuuucucugugcu

SEQ ID NO: 34918 - RNA, 20 nt, Artificial Sequence
  spacer sequence CTCN PAM
gucuucuuucucugugcucu

SEQ ID NO: 34919 - RNA, 20 nt, Artificial Sequence
  spacer sequence CTCN PAM
gugcucucucugugucagcc

SEQ ID NO: 34920 - RNA, 20 nt, Artificial Sequence
  spacer sequence CTCN PAM
cucugugucagccucccugu

SEQ ID NO: 34921 - RNA, 20 nt, Artificial Sequence
  spacer sequence CTCN PAM
cugugucagccucccugucu

SEQ ID NO: 34922 - RNA, 20 nt, Artificial Sequence
  spacer sequence CTCN PAM
gugucagccucccugucucu

SEQ ID NO: 34923 - RNA, 20 nt, Artificial Sequence
  spacer sequence CTCN PAM
cugucucugucucuuucucu

SEQ ID NO: 34924 - RNA, 20 nt, Artificial Sequence
  spacer sequence CTCN PAM
gucucuuucucuuccccauc

SEQ ID NO: 34925 - RNA, 20 nt, Artificial Sequence
  spacer sequence CTCN PAM
uucucuuccccaucucuguc

SEQ ID NO: 34926 - RNA, 20 nt, Artificial Sequence
  spacer sequence CTCN PAM
uccccaucucugucugucuu

SEQ ID NO: 34927 - RNA, 20 nt, Artificial Sequence
  spacer sequence CTCN PAM
gucugucuuuuugucucugu

SEQ ID NO: 34928 - RNA, 20 nt, Artificial Sequence
  spacer sequence CTCN PAM
gucucuguuucuuucugucu

SEQ ID NO: 34929 - RNA, 20 nt, Artificial Sequence
  spacer sequence CTCN PAM
guuucuuucugucucugcgu

SEQ ID NO: 34930 - RNA, 20 nt, Artificial Sequence
  spacer sequence CTCN PAM
gcguaucucuuucugucccu

SEQ ID NO: 34931 - RNA, 20 nt, Artificial Sequence
  spacer sequence CTCN PAM
uucugucccucugucucugu

SEQ ID NO: 34932 - RNA, 20 nt, Artificial Sequence
  spacer sequence CTCN PAM
gucucugucagucucucugu

SEQ ID NO: 34933 - RNA, 20 nt, Artificial Sequence
  spacer sequence CTCN PAM
gucagucucucugugucugu

SEQ ID NO: 34934 - RNA, 20 nt, Artificial Sequence
  spacer sequence CTCN PAM
cugugucugugugugucucc

SEQ ID NO: 34935 - RNA, 20 nt, Artificial Sequence
  spacer sequence CTCN PAM
gugucugugugugucuccau

SEQ ID NO: 34936 - RNA, 20 nt, Artificial Sequence
  spacer sequence CTCN PAM
aucucucucugucuccaucu

SEQ ID NO: 34937 - RNA, 20 nt, Artificial Sequence
  spacer sequence CTCN PAM
cucugucuccaucucucucg

SEQ ID NO: 34938 - RNA, 20 nt, Artificial Sequence
  spacer sequence CTCN PAM
cugucuccaucucucucguu

SEQ ID NO: 34939 - RNA, 20 nt, Artificial Sequence
  spacer sequence CTCN PAM
gucuccaucucucucguugu

SEQ ID NO: 34940 - RNA, 20 nt, Artificial Sequence
  spacer sequence CTCN PAM
aucucucucguugucucucu

SEQ ID NO: 34941 - RNA, 20 nt, Artificial Sequence
  spacer sequence CTCN PAM
cucguugucucucuguuucu

SEQ ID NO: 34942 - RNA, 20 nt, Artificial Sequence
  spacer sequence CTCN PAM
cguugucucucuguuucucu

SEQ ID NO: 34943 - RNA, 20 nt, Artificial Sequence
  spacer sequence CTCN PAM
uugucucucuguuucucuuu

SEQ ID NO: 34944 - RNA, 20 nt, Artificial Sequence
  spacer sequence CTCN PAM
cuguuucucuuuaucucuuu

SEQ ID NO: 34945 - RNA, 20 nt, Artificial Sequence
  spacer sequence CTCN PAM
guuucucuuuaucucuuucu

SEQ ID NO: 34946 - RNA, 20 nt, Artificial Sequence
  spacer sequence CTCN PAM
uuaucucuuucugucucucu

SEQ ID NO: 34947 - RNA, 20 nt, Artificial Sequence
  spacer sequence CTCN PAM
uucugucucucucugccugu

SEQ ID NO: 34948 - RNA, 20 nt, Artificial Sequence
  spacer sequence CTCN PAM
cucugccugucucucugccu

SEQ ID NO: 34949 - RNA, 20 nt, Artificial Sequence
  spacer sequence CTCN PAM
cugccugucucucugccucu

SEQ ID NO: 34950 - RNA, 20 nt, Artificial Sequence
  spacer sequence CTCN PAM
gccugucucucugccucucu

SEQ ID NO: 34951 - RNA, 20 nt, Artificial Sequence
  spacer sequence CTCN PAM
cugccucucugucucucugu

SEQ ID NO: 34952 - RNA, 20 nt, Artificial Sequence
  spacer sequence CTCN PAM
gccucucugucucucuguuu

SEQ ID NO: 34953 - RNA, 20 nt, Artificial Sequence
  spacer sequence CTCN PAM
cugucucucuguuucucugc

SEQ ID NO: 34954 - RNA, 20 nt, Artificial Sequence
  spacer sequence CTCN PAM
gucucucuguuucucugccu

SEQ ID NO: 34955 - RNA, 20 nt, Artificial Sequence
  spacer sequence CTCN PAM
cuguuucucugccugucucu

SEQ ID NO: 34956 - RNA, 20 nt, Artificial Sequence
  spacer sequence CTCN PAM
guuucucugccugucucucu

SEQ ID NO: 34957 - RNA, 20 nt, Artificial Sequence
  spacer sequence CTCN PAM
gccugucucucucucugccu

SEQ ID NO: 34958 - RNA, 20 nt, Artificial Sequence
  spacer sequence CTCN PAM
cucucugccucucuguaucu

SEQ ID NO: 34959 - RNA, 20 nt, Artificial Sequence
  spacer sequence CTCN PAM
cucugccucucuguaucucu

SEQ ID NO: 34960 - RNA, 20 nt, Artificial Sequence
  spacer sequence CTCN PAM
cugccucucuguaucucuau

SEQ ID NO: 34961 - RNA, 20 nt, Artificial Sequence
  spacer sequence CTCN PAM
gccucucuguaucucuaucu

SEQ ID NO: 34962 - RNA, 20 nt, Artificial Sequence
  spacer sequence CTCN PAM
cuguaucucuaucucucugu

SEQ ID NO: 34963 - RNA, 20 nt, Artificial Sequence
  spacer sequence CTCN PAM
guaucucuaucucucugucu

SEQ ID NO: 34964 - RNA, 20 nt, Artificial Sequence
  spacer sequence CTCN PAM
aucucucugucucuuugucu

SEQ ID NO: 34965 - RNA, 20 nt, Artificial Sequence
  spacer sequence CTCN PAM
cugucucuuugucuguuucu

SEQ ID NO: 34966 - RNA, 20 nt, Artificial Sequence
  spacer sequence CTCN PAM
gucucuuugucuguuucugu

SEQ ID NO: 34967 - RNA, 20 nt, Artificial Sequence
  spacer sequence CTCN PAM
uugucuguuucuguucuucu

SEQ ID NO: 34968 - RNA, 20 nt, Artificial Sequence
  spacer sequence CTCN PAM
gucuccuucucugcuucucu

SEQ ID NO: 34969 - RNA, 20 nt, Artificial Sequence
  spacer sequence CTCN PAM
uucucugcuucucugucucc

SEQ ID NO: 34970 - RNA, 20 nt, Artificial Sequence
  spacer sequence CTCN PAM
gcuucucugucuccuucucu

SEQ ID NO: 34971 - RNA, 20 nt, Artificial Sequence
  spacer sequence CTCN PAM
gucuccuucucuuucuguuc

SEQ ID NO: 34972 - RNA, 20 nt, Artificial Sequence
  spacer sequence CTCN PAM
uucucuuucuguuccuaucu

SEQ ID NO: 34973 - RNA, 20 nt, Artificial Sequence
  spacer sequence CTCN PAM
uucuguuccuaucucuuguc

SEQ ID NO: 34974 - RNA, 20 nt, Artificial Sequence
  spacer sequence CTCN PAM
ugucuuuuucucugucucuc

SEQ ID NO: 34975 - RNA, 20 nt, Artificial Sequence
  spacer sequence CTCN PAM
gucucucucugccucucugu

SEQ ID NO: 34976 - RNA, 20 nt, Artificial Sequence
  spacer sequence CTCN PAM
cucugccucucugucucccu

SEQ ID NO: 34977 - RNA, 20 nt, Artificial Sequence
  spacer sequence CTCN PAM
cugccucucugucucccucu

SEQ ID NO: 34978 - RNA, 20 nt, Artificial Sequence
  spacer sequence CTCN PAM
gccucucugucucccucugu

SEQ ID NO: 34979 - RNA, 20 nt, Artificial Sequence
  spacer sequence CTCN PAM
cugucucccucugucucugc

SEQ ID NO: 34980 - RNA, 20 nt, Artificial Sequence
  spacer sequence CTCN PAM
gucucccucugucucugccu

SEQ ID NO: 34981 - RNA, 20 nt, Artificial Sequence
  spacer sequence CTCN PAM
cucugucucugccucucucu

SEQ ID NO: 34982 - RNA, 20 nt, Artificial Sequence
  spacer sequence CTCN PAM
gucucugccucucucuccuu

SEQ ID NO: 34983 - RNA, 20 nt, Artificial Sequence
  spacer sequence CTCN PAM
gccucucucuccuuccccuu

SEQ ID NO: 34984 - RNA, 20 nt, Artificial Sequence
  spacer sequence CTCN PAM
cucuccuuccccuucacacu

SEQ ID NO: 34985 - RNA, 20 nt, Artificial Sequence
  spacer sequence CTCN PAM
cuccuuccccuucacacugg

SEQ ID NO: 34986 - RNA, 20 nt, Artificial Sequence
  spacer sequence CTCN PAM
ccuuccccuucacacugggg

SEQ ID NO: 34987 - RNA, 20 nt, Artificial Sequence
  spacer sequence CTCN PAM
uuccccuucacacuggggac

SEQ ID NO: 34988 - RNA, 20 nt, Artificial Sequence
  spacer sequence CTCN PAM
ccugacuggcccggacaggg

SEQ ID NO: 34989 - RNA, 20 nt, Artificial Sequence
  spacer sequence CTCN PAM
cuuccagaccucccgcucca

SEQ ID NO: 34990 - RNA, 20 nt, Artificial Sequence
  spacer sequence CTCN PAM
uccagaccucccgcuccacc

SEQ ID NO: 34991 - RNA, 20 nt, Artificial Sequence
  spacer sequence CTCN PAM
cgcuccaccccacucccugc

SEQ ID NO: 34992 - RNA, 20 nt, Artificial Sequence
  spacer sequence CTCN PAM
accccacucccugcugccug

SEQ ID NO: 34993 - RNA, 20 nt, Artificial Sequence
  spacer sequence CTCN PAM
cugcugccugcaccccugcg

SEQ ID NO: 34994 - RNA, 20 nt, Artificial Sequence
  spacer sequence CTCN PAM
gugcuggcaugaaggucucu

SEQ ID NO: 34995 - RNA, 20 nt, Artificial Sequence
  spacer sequence CTCN PAM
acccaccgggaggagcccag

SEQ ID NO: 34996 - RNA, 20 nt, Artificial Sequence
  spacer sequence CTCN PAM
cgguggguagagaccuucau

SEQ ID NO: 34997 - RNA, 20 nt, Artificial Sequence
  spacer sequence CTCN PAM
ucccgguggguagagaccuu

SEQ ID NO: 34998 - RNA, 20 nt, Artificial Sequence
  spacer sequence CTCN PAM
cacgggcuggggacccugug

SEQ ID NO: 34999 - RNA, 20 nt, Artificial Sequence
  spacer sequence CTCN PAM
cgggcuggggacccugugcg

SEQ ID NO: 35000 - RNA, 20 nt, Artificial Sequence
  spacer sequence CTCN PAM
cccugugagccugcauuucc

SEQ ID NO: 35001 - RNA, 20 nt, Artificial Sequence
  spacer sequence CTCN PAM
cagggggagcgaugcgcaca

SEQ ID NO: 35002 - RNA, 20 nt, Artificial Sequence
  spacer sequence CTCN PAM
gcaaacacccugcauguggg

SEQ ID NO: 35003 - RNA, 20 nt, Artificial Sequence
  spacer sequence CTCN PAM
cagagcggugcucuggggaa

SEQ ID NO: 35004 - RNA, 20 nt, Artificial Sequence
  spacer sequence CTCN PAM
gagcggugcucuggggaacc

SEQ ID NO: 35005 - RNA, 20 nt, Artificial Sequence
  spacer sequence CTCN PAM
gagagggcucugcaaacacc

SEQ ID NO: 35006 - RNA, 20 nt, Artificial Sequence
  spacer sequence CTCN PAM
ggggaaccacagggcagagg

SEQ ID NO: 35007 - RNA, 20 nt, Artificial Sequence
  spacer sequence CTCN PAM
gcccugugguuccccagagc

SEQ ID NO: 35008 - RNA, 20 nt, Artificial Sequence
  spacer sequence CTCN PAM
gcccgucggggcucccagcc

SEQ ID NO: 35009 - RNA, 20 nt, Artificial Sequence
  spacer sequence CTCN PAM
cagccagauggggaaggaga

SEQ ID NO: 35010 - RNA, 20 nt, Artificial Sequence
  spacer sequence CTCN PAM
uuccccaucuggcugggagc

SEQ ID NO: 35011 - RNA, 20 nt, Artificial Sequence
  spacer sequence CTCN PAM
gcaggcagaggccaggggaa

SEQ ID NO: 35012 - RNA, 20 nt, Artificial Sequence
  spacer sequence CTCN PAM
gccugcagaguuucaaaugc

SEQ ID NO: 35013 - RNA, 20 nt, Artificial Sequence
  spacer sequence CTCN PAM
acccgggauuccccuggccu

SEQ ID NO: 35014 - RNA, 20 nt, Artificial Sequence
  spacer sequence CTCN PAM
uccacccgggauuccccugg

SEQ ID NO: 35015 - RNA, 20 nt, Artificial Sequence
  spacer sequence CTCN PAM
cccugccugcuccuccaccc

SEQ ID NO: 35016 - RNA, 20 nt, Artificial Sequence
  spacer sequence CTCN PAM
gggcccucacccugccugcu

SEQ ID NO: 35017 - RNA, 20 nt, Artificial Sequence
  spacer sequence CTCN PAM
cagggcccucacccugccug

SEQ ID NO: 35018 - RNA, 20 nt, Artificial Sequence
  spacer sequence CTCN PAM
ccggguuaggagcaggcagg

SEQ ID NO: 35019 - RNA, 20 nt, Artificial Sequence
  spacer sequence CTCN PAM
uaacccggggagggacucuc

SEQ ID NO: 35020 - RNA, 20 nt, Artificial Sequence
  spacer sequence CTCN PAM
cccugccugcuccuaacccg

SEQ ID NO: 35021 - RNA, 20 nt, Artificial Sequence
  spacer sequence CTCN PAM
gggcccucacccugccugcu

SEQ ID NO: 35022 - RNA, 20 nt, Artificial Sequence
  spacer sequence CTCN PAM
cagggcccucacccugccug

SEQ ID NO: 35023 - RNA, 20 nt, Artificial Sequence
  spacer sequence CTCN PAM
ccgggccacccccagccaca

SEQ ID NO: 35024 - RNA, 20 nt, Artificial Sequence
  spacer sequence CTCN PAM
cccgucacacagggaaccug

SEQ ID NO: 35025 - RNA, 20 nt, Artificial Sequence
  spacer sequence CTCN PAM
ccaggaccaguggguacggg

SEQ ID NO: 35026 - RNA, 20 nt, Artificial Sequence
  spacer sequence CTCN PAM
cagcugcccuccccaggacc

SEQ ID NO: 35027 - RNA, 20 nt, Artificial Sequence
  spacer sequence CTCN PAM
gccccccuagugcacacaca

SEQ ID NO: 35028 - RNA, 20 nt, Artificial Sequence
  spacer sequence CTCN PAM
ccccaaggacccucccuucc

SEQ ID NO: 35029 - RNA, 20 nt, Artificial Sequence
  spacer sequence CTCN PAM
cuuccgggaucuacaccccu

SEQ ID NO: 35030 - RNA, 20 nt, Artificial Sequence
  spacer sequence CTCN PAM
ccagcacauccacccaccac

SEQ ID NO: 35031 - RNA, 20 nt, Artificial Sequence
  spacer sequence CTCN PAM
cagacaauagaauucaucac

SEQ ID NO: 35032 - RNA, 20 nt, Artificial Sequence
  spacer sequence CTCN PAM
ggggcuggggcuuaaucagu

SEQ ID NO: 35033 - RNA, 20 nt, Artificial Sequence
  spacer sequence CTCN PAM
gcugucauuaauaugcaaaa

SEQ ID NO: 35034 - RNA, 20 nt, Artificial Sequence
  spacer sequence CTCN PAM
gaaacuacggaggcggugag

SEQ ID NO: 35035 - RNA, 20 nt, Artificial Sequence
  spacer sequence CTCN PAM
guaguuucagagcuacugca

SEQ ID NO: 35036 - RNA, 20 nt, Artificial Sequence
  spacer sequence CTCN PAM
ccgccuccguaguuucagag

SEQ ID NO: 35037 - RNA, 20 nt, Artificial Sequence
  spacer sequence CTCN PAM
cccccucaccgccuccguag

SEQ ID NO: 35038 - RNA, 20 nt, Artificial Sequence
  spacer sequence CTCN PAM
ccuggccuggggggugcugg

SEQ ID NO: 35039 - RNA, 20 nt, Artificial Sequence
  spacer sequence CTCN PAM
gguuacagguuacagggucu

SEQ ID NO: 35040 - RNA, 20 nt, Artificial Sequence
  spacer sequence CTCN PAM
gcccugggagcggccccugc

SEQ ID NO: 35041 - RNA, 20 nt, Artificial Sequence
  spacer sequence CTCN PAM
cagggcagagacccuguaac

SEQ ID NO: 35042 - RNA, 20 nt, Artificial Sequence
  spacer sequence CTCN PAM
gggagcugcagggacccuug

SEQ ID NO: 35043 - RNA, 20 nt, Artificial Sequence
  spacer sequence CTCN PAM
cagaggcaggggccgcuccc

SEQ ID NO: 35044 - RNA, 20 nt, Artificial Sequence
  spacer sequence CTCN PAM
ggggcucacaggaaucacag

SEQ ID NO: 35045 - RNA, 20 nt, Artificial Sequence
  spacer sequence CTCN PAM
caggaaucacagagucucug

SEQ ID NO: 35046 - RNA, 20 nt, Artificial Sequence
  spacer sequence CTCN PAM
gucuuugacucucugucucu

SEQ ID NO: 35047 - RNA, 20 nt, Artificial Sequence
  spacer sequence CTCN PAM
cugucucucucugccucuau

SEQ ID NO: 35048 - RNA, 20 nt, Artificial Sequence
  spacer sequence CTCN PAM
gucucucucugccucuaucu

SEQ ID NO: 35049 - RNA, 20 nt, Artificial Sequence
  spacer sequence CTCN PAM
cucugccucuaucucuguuu

SEQ ID NO: 35050 - RNA, 20 nt, Artificial Sequence
  spacer sequence CTCN PAM
cugccucuaucucuguuucu

SEQ ID NO: 35051 - RNA, 20 nt, Artificial Sequence
  spacer sequence CTCN PAM
gccucuaucucuguuucugu

SEQ ID NO: 35052 - RNA, 20 nt, Artificial Sequence
  spacer sequence CTCN PAM
aucucuguuucugucucucu

SEQ ID NO: 35053 - RNA, 20 nt, Artificial Sequence
  spacer sequence CTCN PAM
guuucugucucucugugucu

SEQ ID NO: 35054 - RNA, 20 nt, Artificial Sequence
  spacer sequence CTCN PAM
cugugucucucucugucucu

SEQ ID NO: 35055 - RNA, 20 nt, Artificial Sequence
  spacer sequence CTCN PAM
gugucucucucugucucuau

SEQ ID NO: 35056 - RNA, 20 nt, Artificial Sequence
  spacer sequence CTCN PAM
cucugucucuaucucuucuc

SEQ ID NO: 35057 - RNA, 20 nt, Artificial Sequence
  spacer sequence CTCN PAM
cugucucuaucucuucucua

SEQ ID NO: 35058 - RNA, 20 nt, Artificial Sequence
  spacer sequence CTCN PAM
gucucuaucucuucucuauu

SEQ ID NO: 35059 - RNA, 20 nt, Artificial Sequence
  spacer sequence CTCN PAM
aucucuucucuauuucacuc

SEQ ID NO: 35060 - RNA, 20 nt, Artificial Sequence
  spacer sequence CTCN PAM
ucucuauuucacucucugcc

SEQ ID NO: 35061 - RNA, 20 nt, Artificial Sequence
  spacer sequence CTCN PAM
auuucacucucugccucucu

SEQ ID NO: 35062 - RNA, 20 nt, Artificial Sequence
  spacer sequence CTCN PAM
cugccucucucugucugugu

SEQ ID NO: 35063 - RNA, 20 nt, Artificial Sequence
  spacer sequence CTCN PAM
gccucucucugucugugucu

SEQ ID NO: 35064 - RNA, 20 nt, Artificial Sequence
  spacer sequence CTCN PAM
cucugucugugucucugucu

SEQ ID NO: 35065 - RNA, 20 nt, Artificial Sequence
  spacer sequence CTCN PAM
cugucugugucucugucuuu

SEQ ID NO: 35066 - RNA, 20 nt, Artificial Sequence
  spacer sequence CTCN PAM
gucugugucucugucuuuuu

SEQ ID NO: 35067 - RNA, 20 nt, Artificial Sequence
  spacer sequence CTCN PAM
gucuuuuucugucucuuucu

SEQ ID NO: 35068 - RNA, 20 nt, Artificial Sequence
  spacer sequence CTCN PAM
uucucugucucucugugucu

SEQ ID NO: 35069 - RNA, 20 nt, Artificial Sequence
  spacer sequence CTCN PAM
gucucucugugucucucucu

SEQ ID NO: 35070 - RNA, 20 nt, Artificial Sequence
  spacer sequence CTCN PAM
cugugucucucucugccucu

SEQ ID NO: 35071 - RNA, 20 nt, Artificial Sequence
  spacer sequence CTCN PAM
gugucucucucugccucuau

SEQ ID NO: 35072 - RNA, 20 nt, Artificial Sequence
  spacer sequence CTCN PAM
cucugccucuaucuuucucu

SEQ ID NO: 35073 - RNA, 20 nt, Artificial Sequence
  spacer sequence CTCN PAM
cugccucuaucuuucucucu

SEQ ID NO: 35074 - RNA, 20 nt, Artificial Sequence
  spacer sequence CTCN PAM
gccucuaucuuucucucugu

SEQ ID NO: 35075 - RNA, 20 nt, Artificial Sequence
  spacer sequence CTCN PAM
aucuuucucucugucucugu

SEQ ID NO: 35076 - RNA, 20 nt, Artificial Sequence
  spacer sequence CTCN PAM
cugucucugugucugucucu

SEQ ID NO: 35077 - RNA, 20 nt, Artificial Sequence
  spacer sequence CTCN PAM
gucucugugucugucucugu

SEQ ID NO: 35078 - RNA, 20 nt, Artificial Sequence
  spacer sequence CTCN PAM
gugucugucucugucucucu

SEQ ID NO: 35079 - RNA, 20 nt, Artificial Sequence
  spacer sequence CTCN PAM
gucucucugucucugccucu

SEQ ID NO: 35080 - RNA, 20 nt, Artificial Sequence
  spacer sequence CTCN PAM
cugucucugccucucucucu

SEQ ID NO: 35081 - RNA, 20 nt, Artificial Sequence
  spacer sequence CTCN PAM
gucucugccucucucucucu

SEQ ID NO: 35082 - RNA, 20 nt, Artificial Sequence
  spacer sequence CTCN PAM
gccucucucucucucugucu

SEQ ID NO: 35083 - RNA, 20 nt, Artificial Sequence
  spacer sequence CTCN PAM
cucucucucugucucuaucu

SEQ ID NO: 35084 - RNA, 20 nt, Artificial Sequence
  spacer sequence CTCN PAM
cucucucugucucuaucuca

SEQ ID NO: 35085 - RNA, 20 nt, Artificial Sequence
  spacer sequence CTCN PAM
cucucugucucuaucucauu

SEQ ID NO: 35086 - RNA, 20 nt, Artificial Sequence
  spacer sequence CTCN PAM
cucugucucuaucucauucu

SEQ ID NO: 35087 - RNA, 20 nt, Artificial Sequence
  spacer sequence CTCN PAM
cugucucuaucucauucucu

SEQ ID NO: 35088 - RNA, 20 nt, Artificial Sequence
  spacer sequence CTCN PAM
gucucuaucucauucucugu

SEQ ID NO: 35089 - RNA, 20 nt, Artificial Sequence
  spacer sequence CTCN PAM
aucucauucucugucucucu

SEQ ID NO: 35090 - RNA, 20 nt, Artificial Sequence
  spacer sequence CTCN PAM
uucucugucucucugucucc

SEQ ID NO: 35091 - RNA, 20 nt, Artificial Sequence
  spacer sequence CTCN PAM
gucucucugucucccucucu

SEQ ID NO: 35092 - RNA, 20 nt, Artificial Sequence
  spacer sequence CTCN PAM
cugucucccucucuccuccu

SEQ ID NO: 35093 - RNA, 20 nt, Artificial Sequence
  spacer sequence CTCN PAM
gucucccucucuccuccucc

SEQ ID NO: 35094 - RNA, 20 nt, Artificial Sequence
  spacer sequence CTCN PAM
cucucuccuccucccucucu

SEQ ID NO: 35095 - RNA, 20 nt, Artificial Sequence
  spacer sequence CTCN PAM
cuccuccucccucucucucu

SEQ ID NO: 35096 - RNA, 20 nt, Artificial Sequence
  spacer sequence CTCN PAM
ccuccucccucucucucuuu

SEQ ID NO: 35097 - RNA, 20 nt, Artificial Sequence
  spacer sequence CTCN PAM
uccucccucucucucuuugc

SEQ ID NO: 35098 - RNA, 20 nt, Artificial Sequence
  spacer sequence CTCN PAM
ucccucucucucuuugcucc

SEQ ID NO: 35099 - RNA, 20 nt, Artificial Sequence
  spacer sequence CTCN PAM
cucucucucuuugcuccccc

SEQ ID NO: 35100 - RNA, 20 nt, Artificial Sequence
  spacer sequence CTCN PAM
cucucuuugcuccccccucu

SEQ ID NO: 35101 - RNA, 20 nt, Artificial Sequence
  spacer sequence CTCN PAM
cucuuugcuccccccucucc

SEQ ID NO: 35102 - RNA, 20 nt, Artificial Sequence
  spacer sequence CTCN PAM
cuuugcuccccccucuccau

SEQ ID NO: 35103 - RNA, 20 nt, Artificial Sequence
  spacer sequence CTCN PAM
uugcuccccccucuccauca

SEQ ID NO: 35104 - RNA, 20 nt, Artificial Sequence
  spacer sequence CTCN PAM
ccccucuccaucacagaacc

SEQ ID NO: 35105 - RNA, 20 nt, Artificial Sequence
  spacer sequence CTCN PAM
ccaucacagaacccaaagca

SEQ ID NO: 35106 - RNA, 20 nt, Artificial Sequence
  spacer sequence CTCN PAM
aucacagaacccaaagcagg

SEQ ID NO: 35107 - RNA, 20 nt, Artificial Sequence
  spacer sequence CTCN PAM
gguccugcuuuggguucugu

SEQ ID NO: 35108 - RNA, 20 nt, Artificial Sequence
  spacer sequence CTCN PAM
cccagaaggugcccugggga

SEQ ID NO: 35109 - RNA, 20 nt, Artificial Sequence
  spacer sequence CTCN PAM
ccagggcaccuucuggggga

SEQ ID NO: 35110 - RNA, 20 nt, Artificial Sequence
  spacer sequence CTCN PAM
gcugugaugggggcucccca

SEQ ID NO: 35111 - RNA, 20 nt, Artificial Sequence
  spacer sequence CTCN PAM
ggaucacccccguggcuccu

SEQ ID NO: 35112 - RNA, 20 nt, Artificial Sequence
  spacer sequence CTCN PAM
uggcccccgcccggcccugg

SEQ ID NO: 35113 - RNA, 20 nt, Artificial Sequence
  spacer sequence CTCN PAM
gccagggccgggcgggggcc

SEQ ID NO: 35114 - RNA, 20 nt, Artificial Sequence
  spacer sequence CTCN PAM
uguccacccagccuuuguuc

SEQ ID NO: 35115 - RNA, 20 nt, Artificial Sequence
  spacer sequence CTCN PAM
gauguguggggaagguucaa

SEQ ID NO: 35116 - RNA, 20 nt, Artificial Sequence
  spacer sequence CTCN PAM
ggggaaaucugaagccucug

SEQ ID NO: 35117 - RNA, 20 nt, Artificial Sequence
  spacer sequence CTCN PAM
gacgcugcagcugcgucugu

SEQ ID NO: 35118 - RNA, 20 nt, Artificial Sequence
  spacer sequence CTCN PAM
ccggcugugagguggggucc

SEQ ID NO: 35119 - RNA, 20 nt, Artificial Sequence
  spacer sequence CTCN PAM
cagccggugaggggccaacc

SEQ ID NO: 35120 - RNA, 20 nt, Artificial Sequence
  spacer sequence CTCN PAM
ccagugggcagaugaaagca

SEQ ID NO: 35121 - RNA, 20 nt, Artificial Sequence
  spacer sequence CTCN PAM
ccuccuuuccccagcccccc

SEQ ID NO: 35122 - RNA, 20 nt, Artificial Sequence
  spacer sequence CTCN PAM
uuuccccagccccccggccg

SEQ ID NO: 35123 - RNA, 20 nt, Artificial Sequence
  spacer sequence CTCN PAM
ggugguggaaagagcacugu

SEQ ID NO: 35124 - RNA, 20 nt, Artificial Sequence
  spacer sequence CTCN PAM
uuccaccaccugaggcugug

SEQ ID NO: 35125 - RNA, 20 nt, Artificial Sequence
  spacer sequence CTCN PAM
ccccgcacagugcucuuucc

SEQ ID NO: 35126 - RNA, 20 nt, Artificial Sequence
  spacer sequence CTCN PAM
cagguuggagugucccucac

SEQ ID NO: 35127 - RNA, 20 nt, Artificial Sequence
  spacer sequence CTCN PAM
aaccugggagggugugacuc

SEQ ID NO: 35128 - RNA, 20 nt, Artificial Sequence
  spacer sequence CTCN PAM
cagugggacccuggagccuc

SEQ ID NO: 35129 - RNA, 20 nt, Artificial Sequence
  spacer sequence CTCN PAM
agggucccacugugagggac

SEQ ID NO: 35130 - RNA, 20 nt, Artificial Sequence
  spacer sequence CTCN PAM
gggcucucgucugcaaagug

SEQ ID NO: 35131 - RNA, 20 nt, Artificial Sequence
  spacer sequence CTCN PAM
cgucugcaaaguggggguga

SEQ ID NO: 35132 - RNA, 20 nt, Artificial Sequence
  spacer sequence CTCN PAM
ucugcaaagugggggugagu

SEQ ID NO: 35133 - RNA, 20 nt, Artificial Sequence
  spacer sequence CTCN PAM
cccccacuuugcagacgaga

SEQ ID NO: 35134 - RNA, 20 nt, Artificial Sequence
  spacer sequence CTCN PAM
aacucacccccacuuugcag

SEQ ID NO: 35135 - RNA, 20 nt, Artificial Sequence
  spacer sequence CTCN PAM
aggaaaugguguuguuuccu

SEQ ID NO: 35136 - RNA, 20 nt, Artificial Sequence
  spacer sequence CTCN PAM
caccugucaucccggcgcuu

SEQ ID NO: 35137 - RNA, 20 nt, Artificial Sequence
  spacer sequence CTCN PAM
caaagcgccgggaugacagg

SEQ ID NO: 35138 - RNA, 20 nt, Artificial Sequence
  spacer sequence CTCN PAM
ggugauccacccaccuaggc

SEQ ID NO: 35139 - RNA, 20 nt, Artificial Sequence
  spacer sequence CTCN PAM
ugaccucaggugauccaccc

SEQ ID NO: 35140 - RNA, 20 nt, Artificial Sequence
  spacer sequence CTCN PAM
aacuccugaccucaggugau

SEQ ID NO: 35141 - RNA, 20 nt, Artificial Sequence
  spacer sequence CTCN PAM
acuaaaaauacaaaaauuag

SEQ ID NO: 35142 - RNA, 20 nt, Artificial Sequence
  spacer sequence CTCN PAM
gaaggcugaggcaggagaau

SEQ ID NO: 35143 - RNA, 20 nt, Artificial Sequence
  spacer sequence CTCN PAM
gccuucugaguagcuggaau

SEQ ID NO: 35144 - RNA, 20 nt, Artificial Sequence
  spacer sequence CTCN PAM
ugccucagccuucugaguag

SEQ ID NO: 35145 - RNA, 20 nt, Artificial Sequence
  spacer sequence CTCN PAM
cggguucaagcgauucuccu

SEQ ID NO: 35146 - RNA, 20 nt, Artificial Sequence
  spacer sequence CTCN PAM
aucucccggguucaagcgau

SEQ ID NO: 35147 - RNA, 20 nt, Artificial Sequence
  spacer sequence CTCN PAM
cugcaaccuccaucucccgg

SEQ ID NO: 35148 - RNA, 20 nt, Artificial Sequence
  spacer sequence CTCN PAM
gcucacugcaaccuccaucu

SEQ ID NO: 35149 - RNA, 20 nt, Artificial Sequence
  spacer sequence CTCN PAM
cuguguugcccaggcugggg

SEQ ID NO: 35150 - RNA, 20 nt, Artificial Sequence
  spacer sequence CTCN PAM
aucucaaaaaaaaaaaaaaa

SEQ ID NO: 35151 - RNA, 20 nt, Artificial Sequence
  spacer sequence CTCN PAM
aaaaaaaaaaaaaaacagaa

SEQ ID NO: 35152 - RNA, 20 nt, Artificial Sequence
  spacer sequence CTCN PAM
cagccaaggccuccucugug

SEQ ID NO: 35153 - RNA, 20 nt, Artificial Sequence
  spacer sequence CTCN PAM
ucuguggcaaauuccauugc

SEQ ID NO: 35154 - RNA, 20 nt, Artificial Sequence
  spacer sequence CTCN PAM
guggcaaauuccauugcccc

SEQ ID NO: 35155 - RNA, 20 nt, Artificial Sequence
  spacer sequence CTCN PAM
ugugcaagcguucgaagaug

SEQ ID NO: 35156 - RNA, 20 nt, Artificial Sequence
  spacer sequence CTCN PAM
ggcuuucgaacuguggggga

SEQ ID NO: 35157 - RNA, 20 nt, Artificial Sequence
  spacer sequence CTCN PAM
gugggcagcagggccuguuc

SEQ ID NO: 35158 - RNA, 20 nt, Artificial Sequence
  spacer sequence CTCN PAM
ccgucugcccgccccaccuu

SEQ ID NO: 35159 - RNA, 20 nt, Artificial Sequence
  spacer sequence CTCN PAM
cccagcaccgacauccguuu

SEQ ID NO: 35160 - RNA, 20 nt, Artificial Sequence
  spacer sequence CTCN PAM
cccagcuccaugaucgugac

SEQ ID NO: 35161 - RNA, 20 nt, Artificial Sequence
  spacer sequence CTCN PAM
augaucgugacgguguccug

SEQ ID NO: 35162 - RNA, 20 nt, Artificial Sequence
  spacer sequence CTCN PAM
ucgggggaggccgccuggua

SEQ ID NO: 35163 - RNA, 20 nt, Artificial Sequence
  spacer sequence CTCN PAM
cccgacgagggggcgcuggu

SEQ ID NO: 35164 - RNA, 20 nt, Artificial Sequence
  spacer sequence CTCN PAM
cuaccagaccagcuguugua

SEQ ID NO: 35165 - RNA, 20 nt, Artificial Sequence
  spacer sequence CTCN PAM
accacgugaccccaaaaugg

SEQ ID NO: 35166 - RNA, 20 nt, Artificial Sequence
  spacer sequence CTCN PAM
aucuccacagugcagggagg

SEQ ID NO: 35167 - RNA, 20 nt, Artificial Sequence
  spacer sequence CTCN PAM
acagugcagggaggagaugg

SEQ ID NO: 35168 - RNA, 20 nt, Artificial Sequence
  spacer sequence CTCN PAM
cugcacuguggagauggaga

SEQ ID NO: 35169 - RNA, 20 nt, Artificial Sequence
  spacer sequence CTCN PAM
ucccugcacuguggagaugg

SEQ ID NO: 35170 - RNA, 20 nt, Artificial Sequence
  spacer sequence TTCN PAM
ccauguugcccaggcugguc

SEQ ID NO: 35171 - RNA, 20 nt, Artificial Sequence
  spacer sequence TTCN PAM
aaaauuagcugggcguggua

SEQ ID NO: 35172 - RNA, 20 nt, Artificial Sequence
  spacer sequence TTCN PAM
ccugccucagccuccuccca

SEQ ID NO: 35173 - RNA, 20 nt, Artificial Sequence
  spacer sequence TTCN PAM
aacaauucuccugccucagc

SEQ ID NO: 35174 - RNA, 20 nt, Artificial Sequence
  spacer sequence TTCN PAM
cccaccucggccucccaaag

SEQ ID NO: 35175 - RNA, 20 nt, Artificial Sequence
  spacer sequence TTCN PAM
gaccucgugauucgcccacc

SEQ ID NO: 35176 - RNA, 20 nt, Artificial Sequence
  spacer sequence TTCN PAM
cgacguuagccaggaugguc

SEQ ID NO: 35177 - RNA, 20 nt, Artificial Sequence
  spacer sequence TTCN PAM
auuuuuaguagagacaaggu

SEQ ID NO: 35178 - RNA, 20 nt, Artificial Sequence
  spacer sequence TTCN PAM
agcuacucaggaagcugagg

SEQ ID NO: 35179 - RNA, 20 nt, Artificial Sequence
  spacer sequence TTCN PAM
ugaguagcuggaacuacagg

SEQ ID NO: 35180 - RNA, 20 nt, Artificial Sequence
  spacer sequence TTCN PAM
ccugccucagcuuccugagu

SEQ ID NO: 35181 - RNA, 20 nt, Artificial Sequence
  spacer sequence TTCN PAM
ugccauucuccugccucagc

SEQ ID NO: 35182 - RNA, 20 nt, Artificial Sequence
  spacer sequence TTCN PAM
gugcugcgaucucggcuuac

SEQ ID NO: 35183 - RNA, 20 nt, Artificial Sequence
  spacer sequence TTCN PAM
uugagacaaagucucgcucu

SEQ ID NO: 35184 - RNA, 20 nt, Artificial Sequence
  spacer sequence TTCN PAM
cuuuuauuuauuuauuuauu

SEQ ID NO: 35185 - RNA, 20 nt, Artificial Sequence
  spacer sequence TTCN PAM
acucagacaaggaggccaca

SEQ ID NO: 35186 - RNA, 20 nt, Artificial Sequence
  spacer sequence TTCN PAM
cuauugcugaguccauguuu

SEQ ID NO: 35187 - RNA, 20 nt, Artificial Sequence
  spacer sequence TTCN PAM
uuuaaccgguuacaaacgaa

SEQ ID NO: 35188 - RNA, 20 nt, Artificial Sequence
  spacer sequence TTCN PAM
uuuguaaccgguuaaaggaa

SEQ ID NO: 35189 - RNA, 20 nt, Artificial Sequence
  spacer sequence TTCN PAM
gagacucuuucguuuguaac

SEQ ID NO: 35190 - RNA, 20 nt, Artificial Sequence
  spacer sequence TTCN PAM
gggagaacgggcugauaucu

SEQ ID NO: 35191 - RNA, 20 nt, Artificial Sequence
  spacer sequence TTCN PAM
cccugaaaaggcaggauauc

SEQ ID NO: 35192 - RNA, 20 nt, Artificial Sequence
  spacer sequence TTCN PAM
cugccucuuugccuguaacu

SEQ ID NO: 35193 - RNA, 20 nt, Artificial Sequence
  spacer sequence TTCN PAM
uggaugccuagaaaaccagc

SEQ ID NO: 35194 - RNA, 20 nt, Artificial Sequence
  spacer sequence TTCN PAM
aggcauccaggaagcaggag

SEQ ID NO: 35195 - RNA, 20 nt, Artificial Sequence
  spacer sequence TTCN PAM
ucgggccgggaucacucaua

SEQ ID NO: 35196 - RNA, 20 nt, Artificial Sequence
  spacer sequence TTCN PAM
cgugaagggguggaggucuu

SEQ ID NO: 35197 - RNA, 20 nt, Artificial Sequence
  spacer sequence TTCN PAM
cgggaaaaccacacagugac

SEQ ID NO: 35198 - RNA, 20 nt, Artificial Sequence
  spacer sequence TTCN PAM
gccuuucccuuuuccuggac

SEQ ID NO: 35199 - RNA, 20 nt, Artificial Sequence
  spacer sequence TTCN PAM
cuuuuccuggacggccccgc

SEQ ID NO: 35200 - RNA, 20 nt, Artificial Sequence
  spacer sequence TTCN PAM
uggacggccccgcacaggcc

SEQ ID NO: 35201 - RNA, 20 nt, Artificial Sequence
  spacer sequence TTCN PAM
cccugcacgggcugcaggau

SEQ ID NO: 35202 - RNA, 20 nt, Artificial Sequence
  spacer sequence TTCN PAM
ccgcggagguggguggggag

SEQ ID NO: 35203 - RNA, 20 nt, Artificial Sequence
  spacer sequence TTCN PAM
cccuccccuccccacccacc

SEQ ID NO: 35204 - RNA, 20 nt, Artificial Sequence
  spacer sequence TTCN PAM
aggacguuguagccaauuug

SEQ ID NO: 35205 - RNA, 20 nt, Artificial Sequence
  spacer sequence TTCN PAM
ggugcagcccaggcuuaucu

SEQ ID NO: 35206 - RNA, 20 nt, Artificial Sequence
  spacer sequence TTCN PAM
gagccaccuggagugugucu

SEQ ID NO: 35207 - RNA, 20 nt, Artificial Sequence
  spacer sequence TTCN PAM
acacagcccuccugcucuag

SEQ ID NO: 35208 - RNA, 20 nt, Artificial Sequence
  spacer sequence TTCN PAM
ccucucacaccugagcccau

SEQ ID NO: 35209 - RNA, 20 nt, Artificial Sequence
  spacer sequence TTCN PAM
cuauccgggcccaucccuca

SEQ ID NO: 35210 - RNA, 20 nt, Artificial Sequence
  spacer sequence TTCN PAM
cgcucaccugccaggccugg

SEQ ID NO: 35211 - RNA, 20 nt, Artificial Sequence
  spacer sequence TTCN PAM
ggugccagccggccagccag

SEQ ID NO: 35212 - RNA, 20 nt, Artificial Sequence
  spacer sequence TTCN PAM
accccuccuggacccucccu

SEQ ID NO: 35213 - RNA, 20 nt, Artificial Sequence
  spacer sequence TTCN PAM
gcuaggcagccccccucagc

SEQ ID NO: 35214 - RNA, 20 nt, Artificial Sequence
  spacer sequence TTCN PAM
gugcuggggagcgguggagu

SEQ ID NO: 35215 - RNA, 20 nt, Artificial Sequence
  spacer sequence TTCN PAM
cucacucacucauucacuca

SEQ ID NO: 35216 - RNA, 20 nt, Artificial Sequence
  spacer sequence TTCN PAM
cucauugacucauucauuca

SEQ ID NO: 35217 - RNA, 20 nt, Artificial Sequence
  spacer sequence TTCN PAM
uucauucacucauucauuca

SEQ ID NO: 35218 - RNA, 20 nt, Artificial Sequence
  spacer sequence TTCN PAM
uucacucauucauucacuca

SEQ ID NO: 35219 - RNA, 20 nt, Artificial Sequence
  spacer sequence TTCN PAM
cucauucauucacucacuca

SEQ ID NO: 35220 - RNA, 20 nt, Artificial Sequence
  spacer sequence TTCN PAM
uucacucacucacucauuca

SEQ ID NO: 35221 - RNA, 20 nt, Artificial Sequence
  spacer sequence TTCN PAM
cucacucacucauucacuca

SEQ ID NO: 35222 - RNA, 20 nt, Artificial Sequence
  spacer sequence TTCN PAM
cucacucacucauucacuca

SEQ ID NO: 35223 - RNA, 20 nt, Artificial Sequence
  spacer sequence TTCN PAM
cucacucauucacucauuca

SEQ ID NO: 35224 - RNA, 20 nt, Artificial Sequence
  spacer sequence TTCN PAM
cucauucauucacacacuca

SEQ ID NO: 35225 - RNA, 20 nt, Artificial Sequence
  spacer sequence TTCN PAM
uucacacacucauuuuuacu

SEQ ID NO: 35226 - RNA, 20 nt, Artificial Sequence
  spacer sequence TTCN PAM
cacacucauuuuuacucauu

SEQ ID NO: 35227 - RNA, 20 nt, Artificial Sequence
  spacer sequence TTCN PAM
cucauuuucacucacucauu

SEQ ID NO: 35228 - RNA, 20 nt, Artificial Sequence
  spacer sequence TTCN PAM
cucacucauucacucauuca

SEQ ID NO: 35229 - RNA, 20 nt, Artificial Sequence
  spacer sequence TTCN PAM
cucauucauucacucauuca

SEQ ID NO: 35230 - RNA, 20 nt, Artificial Sequence
  spacer sequence TTCN PAM
uucacucauucacucauuuu

SEQ ID NO: 35231 - RNA, 20 nt, Artificial Sequence
  spacer sequence TTCN PAM
cucauucacucauuuuuacu

SEQ ID NO: 35232 - RNA, 20 nt, Artificial Sequence
  spacer sequence TTCN PAM
cucauuuuuacucauuuuca

SEQ ID NO: 35233 - RNA, 20 nt, Artificial Sequence
  spacer sequence TTCN PAM
cucauucacucauuuucacu

SEQ ID NO: 35234 - RNA, 20 nt, Artificial Sequence
  spacer sequence TTCN PAM
cucauuuucacucauucacu

SEQ ID NO: 35235 - RNA, 20 nt, Artificial Sequence
  spacer sequence TTCN PAM
cucauucacucacucuuuac

SEQ ID NO: 35236 - RNA, 20 nt, Artificial Sequence
  spacer sequence TTCN PAM
cucacucuuuacucauuuua

SEQ ID NO: 35237 - RNA, 20 nt, Artificial Sequence
  spacer sequence TTCN PAM
uucacucacucauuuucacu

SEQ ID NO: 35238 - RNA, 20 nt, Artificial Sequence
  spacer sequence TTCN PAM
cucacucauuuucacuuauu

SEQ ID NO: 35239 - RNA, 20 nt, Artificial Sequence
  spacer sequence TTCN PAM
cuuauucauucauuuaccca

SEQ ID NO: 35240 - RNA, 20 nt, Artificial Sequence
  spacer sequence TTCN PAM
uucauuuacccacucacuca

SEQ ID NO: 35241 - RNA, 20 nt, Artificial Sequence
  spacer sequence TTCN PAM
uuuacccacucacucauuca

SEQ ID NO: 35242 - RNA, 20 nt, Artificial Sequence
  spacer sequence TTCN PAM
cucauuuucacucacucguu

SEQ ID NO: 35243 - RNA, 20 nt, Artificial Sequence
  spacer sequence TTCN PAM
cucacucguucacucauuuu

SEQ ID NO: 35244 - RNA, 20 nt, Artificial Sequence
  spacer sequence TTCN PAM
cucauuuuucacucauucau

SEQ ID NO: 35245 - RNA, 20 nt, Artificial Sequence
  spacer sequence TTCN PAM
cucauucauucacucauuca

SEQ ID NO: 35246 - RNA, 20 nt, Artificial Sequence
  spacer sequence TTCN PAM
uucacucauucauucgguca

SEQ ID NO: 35247 - RNA, 20 nt, Artificial Sequence
  spacer sequence TTCN PAM
cucauucauucggucacuca

SEQ ID NO: 35248 - RNA, 20 nt, Artificial Sequence
  spacer sequence TTCN PAM
uucggucacucauucacuca

SEQ ID NO: 35249 - RNA, 20 nt, Artificial Sequence
  spacer sequence TTCN PAM
gucacucauucacucauuca

SEQ ID NO: 35250 - RNA, 20 nt, Artificial Sequence
  spacer sequence TTCN PAM
cucauucacucacucacuca

SEQ ID NO: 35251 - RNA, 20 nt, Artificial Sequence
  spacer sequence TTCN PAM
cucacucacucauucauuca

SEQ ID NO: 35252 - RNA, 20 nt, Artificial Sequence
  spacer sequence TTCN PAM
uucauucugucuuucauuca

SEQ ID NO: 35253 - RNA, 20 nt, Artificial Sequence
  spacer sequence TTCN PAM
uucugucuuucauucauucu

SEQ ID NO: 35254 - RNA, 20 nt, Artificial Sequence
  spacer sequence TTCN PAM
gucuuucauucauucucucc

SEQ ID NO: 35255 - RNA, 20 nt, Artificial Sequence
  spacer sequence TTCN PAM
uucauucucuccagaacacc

SEQ ID NO: 35256 - RNA, 20 nt, Artificial Sequence
  spacer sequence TTCN PAM
uucucuccagaacacccugu

SEQ ID NO: 35257 - RNA, 20 nt, Artificial Sequence
  spacer sequence TTCN PAM
cuccagaacacccugugggg

SEQ ID NO: 35258 - RNA, 20 nt, Artificial Sequence
  spacer sequence TTCN PAM
ggagagaaugaaugaaagac

SEQ ID NO: 35259 - RNA, 20 nt, Artificial Sequence
  spacer sequence TTCN PAM
uccugaggcugggucccagc

SEQ ID NO: 35260 - RNA, 20 nt, Artificial Sequence
  spacer sequence TTCN PAM
gggagccaccugagcucccg

SEQ ID NO: 35261 - RNA, 20 nt, Artificial Sequence
  spacer sequence TTCN PAM
ccggggcugcccagcaggug

SEQ ID NO: 35262 - RNA, 20 nt, Artificial Sequence
  spacer sequence TTCN PAM
uuguggugugagucuaaucc

SEQ ID NO: 35263 - RNA, 20 nt, Artificial Sequence
  spacer sequence TTCN PAM
gaguuagugacagugacagg

SEQ ID NO: 35264 - RNA, 20 nt, Artificial Sequence
  spacer sequence TTCN PAM
aggcagugcggggaaccaga

SEQ ID NO: 35265 - RNA, 20 nt, Artificial Sequence
  spacer sequence TTCN PAM
ccgcacugccuggaaccuca

SEQ ID NO: 35266 - RNA, 20 nt, Artificial Sequence
  spacer sequence TTCN PAM
gccacugccgaggccucaac

SEQ ID NO: 35267 - RNA, 20 nt, Artificial Sequence
  spacer sequence TTCN PAM
uggucaggccaggggagggg

SEQ ID NO: 35268 - RNA, 20 nt, Artificial Sequence
  spacer sequence TTCN PAM
ccaggagggcuggaugccag

SEQ ID NO: 35269 - RNA, 20 nt, Artificial Sequence
  spacer sequence TTCN PAM
uuccccaggagggcuggaug

SEQ ID NO: 35270 - RNA, 20 nt, Artificial Sequence
  spacer sequence TTCN PAM
aggugcccugcagagcucag

SEQ ID NO: 35271 - RNA, 20 nt, Artificial Sequence
  spacer sequence TTCN PAM
uccauguccucuggccucaa

SEQ ID NO: 35272 - RNA, 20 nt, Artificial Sequence
  spacer sequence TTCN PAM
ggagccccacagcacuggcc

SEQ ID NO: 35273 - RNA, 20 nt, Artificial Sequence
  spacer sequence TTCN PAM
ccuacccgugcacacagcug

SEQ ID NO: 35274 - RNA, 20 nt, Artificial Sequence
  spacer sequence TTCN PAM
ccuacccgugcacacagcuu

SEQ ID NO: 35275 - RNA, 20 nt, Artificial Sequence
  spacer sequence TTCN PAM
ccuacccgugcacacagcug

SEQ ID NO: 35276 - RNA, 20 nt, Artificial Sequence
  spacer sequence TTCN PAM
ccuacccgugcacacagcuu

SEQ ID NO: 35277 - RNA, 20 nt, Artificial Sequence
  spacer sequence TTCN PAM
accucccuccagacgcccca

SEQ ID NO: 35278 - RNA, 20 nt, Artificial Sequence
  spacer sequence TTCN PAM
cacaguggagcccugagacc

SEQ ID NO: 35279 - RNA, 20 nt, Artificial Sequence
  spacer sequence TTCN PAM
gcccccacagcucugcugcc

SEQ ID NO: 35280 - RNA, 20 nt, Artificial Sequence
  spacer sequence TTCN PAM
agggccccggcugcucagcu

SEQ ID NO: 35281 - RNA, 20 nt, Artificial Sequence
  spacer sequence TTCN PAM
ugcugggaggcccugccgug

SEQ ID NO: 35282 - RNA, 20 nt, Artificial Sequence
  spacer sequence TTCN PAM
ugcuuuggaaacccagccca

SEQ ID NO: 35283 - RNA, 20 nt, Artificial Sequence
  spacer sequence TTCN PAM
aaagcaggaacaugggcugg

SEQ ID NO: 35284 - RNA, 20 nt, Artificial Sequence
  spacer sequence TTCN PAM
ugggcuggguuuccaaagca

SEQ ID NO: 35285 - RNA, 20 nt, Artificial Sequence
  spacer sequence TTCN PAM
ccacguggucuccccagggc

SEQ ID NO: 35286 - RNA, 20 nt, Artificial Sequence
  spacer sequence TTCN PAM
ccggcaggcgucaagcaggg

SEQ ID NO: 35287 - RNA, 20 nt, Artificial Sequence
  spacer sequence TTCN PAM
gugugggcuguggcaacccc

SEQ ID NO: 35288 - RNA, 20 nt, Artificial Sequence
  spacer sequence TTCN PAM
cucgggcaguccggccacag

SEQ ID NO: 35289 - RNA, 20 nt, Artificial Sequence
  spacer sequence TTCN PAM
ccagaagccauguccagcug

SEQ ID NO: 35290 - RNA, 20 nt, Artificial Sequence
  spacer sequence TTCN PAM
ggggaaacggugugggggug

SEQ ID NO: 35291 - RNA, 20 nt, Artificial Sequence
  spacer sequence TTCN PAM
ccuuccuuggcuugggacag

SEQ ID NO: 35292 - RNA, 20 nt, Artificial Sequence
  spacer sequence TTCN PAM
uuggcuugggacagacccuc

SEQ ID NO: 35293 - RNA, 20 nt, Artificial Sequence
  spacer sequence TTCN PAM
ccugagcgagggucuguccc

SEQ ID NO: 35294 - RNA, 20 nt, Artificial Sequence
  spacer sequence TTCN PAM
gcauggaggucucgucucac

SEQ ID NO: 35295 - RNA, 20 nt, Artificial Sequence
  spacer sequence TTCN PAM
ugcccugggacgucucagcc

SEQ ID NO: 35296 - RNA, 20 nt, Artificial Sequence
  spacer sequence TTCN PAM
cccagggcagcggggccaga

SEQ ID NO: 35297 - RNA, 20 nt, Artificial Sequence
  spacer sequence TTCN PAM
aggggaaaggaucccauaaa

SEQ ID NO: 35298 - RNA, 20 nt, Artificial Sequence
  spacer sequence TTCN PAM
ccucgaaggugggagaggcg

SEQ ID NO: 35299 - RNA, 20 nt, Artificial Sequence
  spacer sequence TTCN PAM
cccggcucccgcucccugcu

SEQ ID NO: 35300 - RNA, 20 nt, Artificial Sequence
  spacer sequence TTCN PAM
uauugcaggucggggccuag

SEQ ID NO: 35301 - RNA, 20 nt, Artificial Sequence
  spacer sequence TTCN PAM
uuggagacccagcagcccau

SEQ ID NO: 35302 - RNA, 20 nt, Artificial Sequence
  spacer sequence TTCN PAM
aacaaacagcgaguccccca

SEQ ID NO: 35303 - RNA, 20 nt, Artificial Sequence
  spacer sequence TTCN PAM
uccccacacccggcagcccu

SEQ ID NO: 35304 - RNA, 20 nt, Artificial Sequence
  spacer sequence TTCN PAM
cucuuugagccccagcuguu

SEQ ID NO: 35305 - RNA, 20 nt, Artificial Sequence
  spacer sequence TTCN PAM
cugacauccagcccccagug

SEQ ID NO: 35306 - RNA, 20 nt, Artificial Sequence
  spacer sequence TTCN PAM
agcaugguugaggcuacccc

SEQ ID NO: 35307 - RNA, 20 nt, Artificial Sequence
  spacer sequence TTCN PAM
auuuccagcaugguugaggc

SEQ ID NO: 35308 - RNA, 20 nt, Artificial Sequence
  spacer sequence TTCN PAM
ggcccagccacagguccggg

SEQ ID NO: 35309 - RNA, 20 nt, Artificial Sequence
  spacer sequence TTCN PAM
caccugagcagaaacccugg

SEQ ID NO: 35310 - RNA, 20 nt, Artificial Sequence
  spacer sequence TTCN PAM
gcucaggugagaaacgcugg

SEQ ID NO: 35311 - RNA, 20 nt, Artificial Sequence
  spacer sequence TTCN PAM
ccuagagcaaaggcugagcu

SEQ ID NO: 35312 - RNA, 20 nt, Artificial Sequence
  spacer sequence TTCN PAM
uggcccccgcauuggguacu

SEQ ID NO: 35313 - RNA, 20 nt, Artificial Sequence
  spacer sequence TTCN PAM
gugggugccgcagcucagag

SEQ ID NO: 35314 - RNA, 20 nt, Artificial Sequence
  spacer sequence TTCN PAM
ccugcccuggccugccuggu

SEQ ID NO: 35315 - RNA, 20 nt, Artificial Sequence
  spacer sequence TTCN PAM
cagcccaccugccaggcuuc

SEQ ID NO: 35316 - RNA, 20 nt, Artificial Sequence
  spacer sequence TTCN PAM
ccccucacugggacagggug

SEQ ID NO: 35317 - RNA, 20 nt, Artificial Sequence
  spacer sequence TTCN PAM
gcuguggaaccaccaccccc

SEQ ID NO: 35318 - RNA, 20 nt, Artificial Sequence
  spacer sequence TTCN PAM
acagcugaaccugagcugca

SEQ ID NO: 35319 - RNA, 20 nt, Artificial Sequence
  spacer sequence TTCN PAM
ggaggcugacggcaggggaa

SEQ ID NO: 35320 - RNA, 20 nt, Artificial Sequence
  spacer sequence TTCN PAM
ccugccgucagccuccagaa

SEQ ID NO: 35321 - RNA, 20 nt, Artificial Sequence
  spacer sequence TTCN PAM
ugugggcuugugcaggccug

SEQ ID NO: 35322 - RNA, 20 nt, Artificial Sequence
  spacer sequence TTCN PAM
aggccugaccugagccggac

SEQ ID NO: 35323 - RNA, 20 nt, Artificial Sequence
  spacer sequence TTCN PAM
gacaaggaccaggaggaggc

SEQ ID NO: 35324 - RNA, 20 nt, Artificial Sequence
  spacer sequence TTCN PAM
gaucugcaccagccccuucc

SEQ ID NO: 35325 - RNA, 20 nt, Artificial Sequence
  spacer sequence TTCN PAM
uuuacagaugaggaaacuga

SEQ ID NO: 35326 - RNA, 20 nt, Artificial Sequence
  spacer sequence TTCN PAM
ucaucuguaaaggaaggggc

SEQ ID NO: 35327 - RNA, 20 nt, Artificial Sequence
  spacer sequence TTCN PAM
agccccagagucccugaggu

SEQ ID NO: 35328 - RNA, 20 nt, Artificial Sequence
  spacer sequence TTCN PAM
agacccggaguccccaccgg

SEQ ID NO: 35329 - RNA, 20 nt, Artificial Sequence
  spacer sequence TTCN PAM
agacccggaguccccaccgg

SEQ ID NO: 35330 - RNA, 20 nt, Artificial Sequence
  spacer sequence TTCN PAM
gggcuggccccggagcugga

SEQ ID NO: 35331 - RNA, 20 nt, Artificial Sequence
  spacer sequence TTCN PAM
acagagcucugagacuuggg

SEQ ID NO: 35332 - RNA, 20 nt, Artificial Sequence
  spacer sequence TTCN PAM
uagagcccaagucucagagc

SEQ ID NO: 35333 - RNA, 20 nt, Artificial Sequence
  spacer sequence TTCN PAM
cauggcucugguuguggggg

SEQ ID NO: 35334 - RNA, 20 nt, Artificial Sequence
  spacer sequence TTCN PAM
cugcccugaggccccagcag

SEQ ID NO: 35335 - RNA, 20 nt, Artificial Sequence
  spacer sequence TTCN PAM
uagcucucuucccugcccug

SEQ ID NO: 35336 - RNA, 20 nt, Artificial Sequence
  spacer sequence TTCN PAM
aagggacaggucuggccacc

SEQ ID NO: 35337 - RNA, 20 nt, Artificial Sequence
  spacer sequence TTCN PAM
gacacguucacggucauccu

SEQ ID NO: 35338 - RNA, 20 nt, Artificial Sequence
  spacer sequence TTCN PAM
cggucauccuuggagccagu

SEQ ID NO: 35339 - RNA, 20 nt, Artificial Sequence
  spacer sequence TTCN PAM
gugacuggcuccaaggauga

SEQ ID NO: 35340 - RNA, 20 nt, Artificial Sequence
  spacer sequence TTCN PAM
gagcucagugugguguuugg

SEQ ID NO: 35341 - RNA, 20 nt, Artificial Sequence
  spacer sequence TTCN PAM
cucucugcccggauucugag

SEQ ID NO: 35342 - RNA, 20 nt, Artificial Sequence
  spacer sequence TTCN PAM
gggcucaccuggccugggag

SEQ ID NO: 35343 - RNA, 20 nt, Artificial Sequence
  spacer sequence TTCN PAM
cagccccucuagaggguagg

SEQ ID NO: 35344 - RNA, 20 nt, Artificial Sequence
  spacer sequence TTCN PAM
ugaggugaccuugaguccgu

SEQ ID NO: 35345 - RNA, 20 nt, Artificial Sequence
  spacer sequence TTCN PAM
ggcucucaagcgucacccca

SEQ ID NO: 35346 - RNA, 20 nt, Artificial Sequence
  spacer sequence TTCN PAM
aggaggagggaggggccucg

SEQ ID NO: 35347 - RNA, 20 nt, Artificial Sequence
  spacer sequence TTCN PAM
cccggggcaugugggcagga

SEQ ID NO: 35348 - RNA, 20 nt, Artificial Sequence
  spacer sequence TTCN PAM
ugcccacaugccccgggaga

SEQ ID NO: 35349 - RNA, 20 nt, Artificial Sequence
  spacer sequence TTCN PAM
ucgcaggccuggccggggca

SEQ ID NO: 35350 - RNA, 20 nt, Artificial Sequence
  spacer sequence TTCN PAM
agcguccacuccgacagcca

SEQ ID NO: 35351 - RNA, 20 nt, Artificial Sequence
  spacer sequence TTCN PAM
ugcccucccuggaugccugc

SEQ ID NO: 35352 - RNA, 20 nt, Artificial Sequence
  spacer sequence TTCN PAM
accugcgcauccccacggac

SEQ ID NO: 35353 - RNA, 20 nt, Artificial Sequence
  spacer sequence TTCN PAM
gaacggccgguccucccggc

SEQ ID NO: 35354 - RNA, 20 nt, Artificial Sequence
  spacer sequence TTCN PAM
gaaugaugcugcacgcuuuc

SEQ ID NO: 35355 - RNA, 20 nt, Artificial Sequence
  spacer sequence TTCN PAM
ccguaggucaggucgcccac

SEQ ID NO: 35356 - RNA, 20 nt, Artificial Sequence
  spacer sequence TTCN PAM
agacugcagcggggucauga

SEQ ID NO: 35357 - RNA, 20 nt, Artificial Sequence
  spacer sequence TTCN PAM
accccaagaggcugcuucaa

SEQ ID NO: 35358 - RNA, 20 nt, Artificial Sequence
  spacer sequence TTCN PAM
guccuaaauacugucauccu

SEQ ID NO: 35359 - RNA, 20 nt, Artificial Sequence
  spacer sequence TTCN PAM
ggucaccacuggugaggaca

SEQ ID NO: 35360 - RNA, 20 nt, Artificial Sequence
  spacer sequence TTCN PAM
ccaggaccgagcaccacccu

SEQ ID NO: 35361 - RNA, 20 nt, Artificial Sequence
  spacer sequence TTCN PAM
uugggggucuggcuggccua

SEQ ID NO: 35362 - RNA, 20 nt, Artificial Sequence
  spacer sequence TTCN PAM
caccugacacagggucccug

SEQ ID NO: 35363 - RNA, 20 nt, Artificial Sequence
  spacer sequence TTCN PAM
uaacuccacgcccugcagcc

SEQ ID NO: 35364 - RNA, 20 nt, Artificial Sequence
  spacer sequence TTCN PAM
uggcccugugccucaguuuc

SEQ ID NO: 35365 - RNA, 20 nt, Artificial Sequence
  spacer sequence TTCN PAM
cuucugucaccaccaggaca

SEQ ID NO: 35366 - RNA, 20 nt, Artificial Sequence
  spacer sequence TTCN PAM
gucaccaccaggacaccgcc

SEQ ID NO: 35367 - RNA, 20 nt, Artificial Sequence
  spacer sequence TTCN PAM
gcagcacuuuggagacagga

SEQ ID NO: 35368 - RNA, 20 nt, Artificial Sequence
  spacer sequence TTCN PAM
agaaccacgagaucugugag

SEQ ID NO: 35369 - RNA, 20 nt, Artificial Sequence
  spacer sequence TTCN PAM
ggaacacgggcuguacgcag

SEQ ID NO: 35370 - RNA, 20 nt, Artificial Sequence
  spacer sequence TTCN PAM
cacaaccuggggcgcagaag

SEQ ID NO: 35371 - RNA, 20 nt, Artificial Sequence
  spacer sequence TTCN PAM
gcgccccagguugugagaac

SEQ ID NO: 35372 - RNA, 20 nt, Artificial Sequence
  spacer sequence TTCN PAM
ugccaauggcauggcugaug

SEQ ID NO: 35373 - RNA, 20 nt, Artificial Sequence
  spacer sequence TTCN PAM
cccucuccugcagcugcggg

SEQ ID NO: 35374 - RNA, 20 nt, Artificial Sequence
  spacer sequence TTCN PAM
cggggcagcccagugcugcc

SEQ ID NO: 35375 - RNA, 20 nt, Artificial Sequence
  spacer sequence TTCN PAM
caccccacuugggcagcccu

SEQ ID NO: 35376 - RNA, 20 nt, Artificial Sequence
  spacer sequence TTCN PAM
aggagcggcgcgugaccaag

SEQ ID NO: 35377 - RNA, 20 nt, Artificial Sequence
  spacer sequence TTCN PAM
ccaccagcggggcgcugugc

SEQ ID NO: 35378 - RNA, 20 nt, Artificial Sequence
  spacer sequence TTCN PAM
gccaccagcuggauuucucc

SEQ ID NO: 35379 - RNA, 20 nt, Artificial Sequence
  spacer sequence TTCN PAM
uccacagacgccaccguggg

SEQ ID NO: 35380 - RNA, 20 nt, Artificial Sequence
  spacer sequence TTCN PAM
gguagggggggcggccggag

SEQ ID NO: 35381 - RNA, 20 nt, Artificial Sequence
  spacer sequence TTCN PAM
cgagcuggccgacccugaca

SEQ ID NO: 35382 - RNA, 20 nt, Artificial Sequence
  spacer sequence TTCN PAM
gcagggucagagucucccgc

SEQ ID NO: 35383 - RNA, 20 nt, Artificial Sequence
  spacer sequence TTCN PAM
cauugacagcaaggcguggc

SEQ ID NO: 35384 - RNA, 20 nt, Artificial Sequence
  spacer sequence TTCN PAM
ugguggucaacaagcacugg

SEQ ID NO: 35385 - RNA, 20 nt, Artificial Sequence
  spacer sequence TTCN PAM
ccacgcugccuggcuccaug

SEQ ID NO: 35386 - RNA, 20 nt, Artificial Sequence
  spacer sequence TTCN PAM
caccggagcccggguggggc

SEQ ID NO: 35387 - RNA, 20 nt, Artificial Sequence
  spacer sequence TTCN PAM
ggucagcccggagcaggcug

SEQ ID NO: 35388 - RNA, 20 nt, Artificial Sequence
  spacer sequence TTCN PAM
ccaggcuuaggucaggcagg

SEQ ID NO: 35389 - RNA, 20 nt, Artificial Sequence
  spacer sequence TTCN PAM
aaaccugccccacagauccu

SEQ ID NO: 35390 - RNA, 20 nt, Artificial Sequence
  spacer sequence TTCN PAM
cgugcauccccuggagggga

SEQ ID NO: 35391 - RNA, 20 nt, Artificial Sequence
  spacer sequence TTCN PAM
agggucucugggucgccagc

SEQ ID NO: 35392 - RNA, 20 nt, Artificial Sequence
  spacer sequence TTCN PAM
gcccugcaccgcugcgcgcg

SEQ ID NO: 35393 - RNA, 20 nt, Artificial Sequence
  spacer sequence TTCN PAM
gcggcgggggcgggccgggg

SEQ ID NO: 35394 - RNA, 20 nt, Artificial Sequence
  spacer sequence TTCN PAM
ugcuccgcagcccccgcguc

SEQ ID NO: 35395 - RNA, 20 nt, Artificial Sequence
  spacer sequence TTCN PAM
gagcgggagcucgggcucgc

SEQ ID NO: 35396 - RNA, 20 nt, Artificial Sequence
  spacer sequence TTCN PAM
acaaccaguucgcggccgag

SEQ ID NO: 35397 - RNA, 20 nt, Artificial Sequence
  spacer sequence TTCN PAM
cggccgagcuggaggugcug

SEQ ID NO: 35398 - RNA, 20 nt, Artificial Sequence
  spacer sequence TTCN PAM
agcucugccagcaccuccag

SEQ ID NO: 35399 - RNA, 20 nt, Artificial Sequence
  spacer sequence TTCN PAM
cagcuccuccccaacggccg

SEQ ID NO: 35400 - RNA, 20 nt, Artificial Sequence
  spacer sequence TTCN PAM
gcccccggcacgcccucccc

SEQ ID NO: 35401 - RNA, 20 nt, Artificial Sequence
  spacer sequence TTCN PAM
ccgcgggccgacccccgcgg

SEQ ID NO: 35402 - RNA, 20 nt, Artificial Sequence
  spacer sequence TTCN PAM
aggaggcccuugccagaggg

SEQ ID NO: 35403 - RNA, 20 nt, Artificial Sequence
  spacer sequence TTCN PAM
uggcgccgcccuggcugcug

SEQ ID NO: 35404 - RNA, 20 nt, Artificial Sequence
  spacer sequence TTCN PAM
cugcaugugucucccccagc

SEQ ID NO: 35405 - RNA, 20 nt, Artificial Sequence
  spacer sequence TTCN PAM
gccucuugaccaccugcagc

SEQ ID NO: 35406 - RNA, 20 nt, Artificial Sequence
  spacer sequence TTCN PAM
gaucggaggagauggaggag

SEQ ID NO: 35407 - RNA, 20 nt, Artificial Sequence
  spacer sequence TTCN PAM
auggcugagagcagucucgg

SEQ ID NO: 35408 - RNA, 20 nt, Artificial Sequence
  spacer sequence TTCN PAM
gccacugagccccggucucu

SEQ ID NO: 35409 - RNA, 20 nt, Artificial Sequence
  spacer sequence TTCN PAM
gagacucuggagagagaccg

SEQ ID NO: 35410 - RNA, 20 nt, Artificial Sequence
  spacer sequence TTCN PAM
ugcacggugggugggccagu

SEQ ID NO: 35411 - RNA, 20 nt, Artificial Sequence
  spacer sequence TTCN PAM
ugagcagcacuggcccaccc

SEQ ID NO: 35412 - RNA, 20 nt, Artificial Sequence
  spacer sequence TTCN PAM
ccuccugcuuuugcccuuuc

SEQ ID NO: 35413 - RNA, 20 nt, Artificial Sequence
  spacer sequence TTCN PAM
uccuuucuccuaaagcugcc

SEQ ID NO: 35414 - RNA, 20 nt, Artificial Sequence
  spacer sequence TTCN PAM
ccuaaagcugcccccaauuu

SEQ ID NO: 35415 - RNA, 20 nt, Artificial Sequence
  spacer sequence TTCN PAM
cuuugcagcugacccaucug

SEQ ID NO: 35416 - RNA, 20 nt, Artificial Sequence
  spacer sequence TTCN PAM
uuccuuuggcaccccugucc

SEQ ID NO: 35417 - RNA, 20 nt, Artificial Sequence
  spacer sequence TTCN PAM
uuuggcaccccuguccaguc

SEQ ID NO: 35418 - RNA, 20 nt, Artificial Sequence
  spacer sequence TTCN PAM
cgucagcccccaucagugcu

SEQ ID NO: 35419 - RNA, 20 nt, Artificial Sequence
  spacer sequence TTCN PAM
ccacagggcucucuccucca

SEQ ID NO: 35420 - RNA, 20 nt, Artificial Sequence
  spacer sequence TTCN PAM
gggaggcuaaggacacaccc

SEQ ID NO: 35421 - RNA, 20 nt, Artificial Sequence
  spacer sequence TTCN PAM
ucagggaggcuaaggacaca

SEQ ID NO: 35422 - RNA, 20 nt, Artificial Sequence
  spacer sequence TTCN PAM
agccuguuguuugcacagcg

SEQ ID NO: 35423 - RNA, 20 nt, Artificial Sequence
  spacer sequence TTCN PAM
ggaggcccagaagcuuucag

SEQ ID NO: 35424 - RNA, 20 nt, Artificial Sequence
  spacer sequence TTCN PAM
gggccuccugaagcagccgc

SEQ ID NO: 35425 - RNA, 20 nt, Artificial Sequence
  spacer sequence TTCN PAM
gacacccugcacaggugacu

SEQ ID NO: 35426 - RNA, 20 nt, Artificial Sequence
  spacer sequence TTCN PAM
gcccuggggacccuuguugg

SEQ ID NO: 35427 - RNA, 20 nt, Artificial Sequence
  spacer sequence TTCN PAM
cacucaaguguggcuggcuu

SEQ ID NO: 35428 - RNA, 20 nt, Artificial Sequence
  spacer sequence TTCN PAM
ucuguucccaagauggaaga

SEQ ID NO: 35429 - RNA, 20 nt, Artificial Sequence
  spacer sequence TTCN PAM
caagauggaagaaccugggc

SEQ ID NO: 35430 - RNA, 20 nt, Artificial Sequence
  spacer sequence TTCN PAM
aucuugggaacagaggaagc

SEQ ID NO: 35431 - RNA, 20 nt, Artificial Sequence
  spacer sequence TTCN PAM
uccaucuugggaacagagga

SEQ ID NO: 35432 - RNA, 20 nt, Artificial Sequence
  spacer sequence TTCN PAM
ccaccuacaacucaaaaggg

SEQ ID NO: 35433 - RNA, 20 nt, Artificial Sequence
  spacer sequence TTCN PAM
cuuuccuaccuucacagcag

SEQ ID NO: 35434 - RNA, 20 nt, Artificial Sequence
  spacer sequence TTCN PAM
uaccuucacagcagcugaca

SEQ ID NO: 35435 - RNA, 20 nt, Artificial Sequence
  spacer sequence TTCN PAM
cagcagcugacacuggagug

SEQ ID NO: 35436 - RNA, 20 nt, Artificial Sequence
  spacer sequence TTCN PAM
ugccagcgagugaccgcaag

SEQ ID NO: 35437 - RNA, 20 nt, Artificial Sequence
  spacer sequence TTCN PAM
uccuguggcuuggcauccca

SEQ ID NO: 35438 - RNA, 20 nt, Artificial Sequence
  spacer sequence TTCN PAM
cuucccguccuucccgcagu

SEQ ID NO: 35439 - RNA, 20 nt, Artificial Sequence
  spacer sequence TTCN PAM
cguccuucccgcaguucacc

SEQ ID NO: 35440 - RNA, 20 nt, Artificial Sequence
  spacer sequence TTCN PAM
cgcaguucaccaaccgcugc

SEQ ID NO: 35441 - RNA, 20 nt, Artificial Sequence
  spacer sequence TTCN PAM
ccaaccgcugccugcucaag

SEQ ID NO: 35442 - RNA, 20 nt, Artificial Sequence
  spacer sequence TTCN PAM
gccacuugagcaggcagcgg

SEQ ID NO: 35443 - RNA, 20 nt, Artificial Sequence
  spacer sequence TTCN PAM
cggaagcccaggcccagugu

SEQ ID NO: 35444 - RNA, 20 nt, Artificial Sequence
  spacer sequence TTCN PAM
gggaaggccucucguggcca

SEQ ID NO: 35445 - RNA, 20 nt, Artificial Sequence
  spacer sequence TTCN PAM
acuugccuggggcuguggcc

SEQ ID NO: 35446 - RNA, 20 nt, Artificial Sequence
  spacer sequence TTCN PAM
uggcucuuccacuugccugg

SEQ ID NO: 35447 - RNA, 20 nt, Artificial Sequence
  spacer sequence TTCN PAM
gucgcuggcucggguccagc

SEQ ID NO: 35448 - RNA, 20 nt, Artificial Sequence
  spacer sequence TTCN PAM
gcuucggucgcuggcucggg

SEQ ID NO: 35449 - RNA, 20 nt, Artificial Sequence
  spacer sequence TTCN PAM
cggcggcacagccagcgggg

SEQ ID NO: 35450 - RNA, 20 nt, Artificial Sequence
  spacer sequence TTCN PAM
ccaggagccguggguguggu

SEQ ID NO: 35451 - RNA, 20 nt, Artificial Sequence
  spacer sequence TTCN PAM
cgccaagacccacacgucac

SEQ ID NO: 35452 - RNA, 20 nt, Artificial Sequence
  spacer sequence TTCN PAM
aacucacgcuaauggcgcuu

SEQ ID NO: 35453 - RNA, 20 nt, Artificial Sequence
  spacer sequence TTCN PAM
cccgaguuguuacugcaacg

SEQ ID NO: 35454 - RNA, 20 nt, Artificial Sequence
  spacer sequence TTCN PAM
gggacaacgacuucccccga

SEQ ID NO: 35455 - RNA, 20 nt, Artificial Sequence
  spacer sequence TTCN PAM
gggggccagucacacuggua

SEQ ID NO: 35456 - RNA, 20 nt, Artificial Sequence
  spacer sequence TTCN PAM
ugcagacaaaacacagcuga

SEQ ID NO: 35457 - RNA, 20 nt, Artificial Sequence
  spacer sequence TTCN PAM
guugccaucuugguguguga

SEQ ID NO: 35458 - RNA, 20 nt, Artificial Sequence
  spacer sequence TTCN PAM
cacaccaagauggcaacgga

SEQ ID NO: 35459 - RNA, 20 nt, Artificial Sequence
  spacer sequence TTCN PAM
uauuugauggcuggaguggg

SEQ ID NO: 35460 - RNA, 20 nt, Artificial Sequence
  spacer sequence TTCN PAM
ucuaccugggcugcaggugg

SEQ ID NO: 35461 - RNA, 20 nt, Artificial Sequence
  spacer sequence TTCN PAM
ccagccccgggggcccacag

SEQ ID NO: 35462 - RNA, 20 nt, Artificial Sequence
  spacer sequence TTCN PAM
ucuccaccacagaguacccc

SEQ ID NO: 35463 - RNA, 20 nt, Artificial Sequence
  spacer sequence TTCN PAM
guccugacguguuugaguuc

SEQ ID NO: 35464 - RNA, 20 nt, Artificial Sequence
  spacer sequence TTCN PAM
gguggcggaccugaaaccgg

SEQ ID NO: 35465 - RNA, 20 nt, Artificial Sequence
  spacer sequence TTCN PAM
gguccgccaccagaacucaa

SEQ ID NO: 35466 - RNA, 20 nt, Artificial Sequence
  spacer sequence TTCN PAM
cgucuugagggugguggggg

SEQ ID NO: 35467 - RNA, 20 nt, Artificial Sequence
  spacer sequence TTCN PAM
cggcccacacacccaggccc

SEQ ID NO: 35468 - RNA, 20 nt, Artificial Sequence
  spacer sequence TTCN PAM
ucgggguucacgggaucggc

SEQ ID NO: 35469 - RNA, 20 nt, Artificial Sequence
  spacer sequence TTCN PAM
cgggaucggcagcagccgcg

SEQ ID NO: 35470 - RNA, 20 nt, Artificial Sequence
  spacer sequence TTCN PAM
gcacacgcaucgaggcggcc

SEQ ID NO: 35471 - RNA, 20 nt, Artificial Sequence
  spacer sequence TTCN PAM
cgccagcacccagcaccgac

SEQ ID NO: 35472 - RNA, 20 nt, Artificial Sequence
  spacer sequence TTCN PAM
ggaugcucaggaggacguug

SEQ ID NO: 35473 - RNA, 20 nt, Artificial Sequence
  spacer sequence TTCN PAM
ggaggcggccgacggcgccg

SEQ ID NO: 35474 - RNA, 20 nt, Artificial Sequence
  spacer sequence TTCN PAM
ggcccgucccuguguccugg

SEQ ID NO: 35475 - RNA, 20 nt, Artificial Sequence
  spacer sequence TTCN PAM
caccgucccugcggcagcug

SEQ ID NO: 35476 - RNA, 20 nt, Artificial Sequence
  spacer sequence TTCN PAM
gcugccgcagggacggugcg

SEQ ID NO: 35477 - RNA, 20 nt, Artificial Sequence
  spacer sequence TTCN PAM
ugcuccacuucccgccgacu

SEQ ID NO: 35478 - RNA, 20 nt, Artificial Sequence
  spacer sequence TTCN PAM
cgccgacucugcccucgagg

SEQ ID NO: 35479 - RNA, 20 nt, Artificial Sequence
  spacer sequence TTCN PAM
ggccccuguuucccugcccc

SEQ ID NO: 35480 - RNA, 20 nt, Artificial Sequence
  spacer sequence TTCN PAM
cugccccuccccauggaacc

SEQ ID NO: 35481 - RNA, 20 nt, Artificial Sequence
  spacer sequence TTCN PAM
auggggaggggcagggaaac

SEQ ID NO: 35482 - RNA, 20 nt, Artificial Sequence
  spacer sequence TTCN PAM
gggguuaccaggguuccaug

SEQ ID NO: 35483 - RNA, 20 nt, Artificial Sequence
  spacer sequence TTCN PAM
ccaccaggucucccugcggc

SEQ ID NO: 35484 - RNA, 20 nt, Artificial Sequence
  spacer sequence TTCN PAM
cacagagggcggccagcacc

SEQ ID NO: 35485 - RNA, 20 nt, Artificial Sequence
  spacer sequence TTCN PAM
caugcccccgcccuaugucu

SEQ ID NO: 35486 - RNA, 20 nt, Artificial Sequence
  spacer sequence TTCN PAM
uguacagccggggccagcgg

SEQ ID NO: 35487 - RNA, 20 nt, Artificial Sequence
  spacer sequence TTCN PAM
cgguguggcaggaggucuuc

SEQ ID NO: 35488 - RNA, 20 nt, Artificial Sequence
  spacer sequence TTCN PAM
agcugccucgagcccagagg

SEQ ID NO: 35489 - RNA, 20 nt, Artificial Sequence
  spacer sequence TTCN PAM
aggcggggacucaguguccu

SEQ ID NO: 35490 - RNA, 20 nt, Artificial Sequence
  spacer sequence TTCN PAM
uggcuuguucucgccccuac

SEQ ID NO: 35491 - RNA, 20 nt, Artificial Sequence
  spacer sequence TTCN PAM
cgccccuacagccuuggggg

SEQ ID NO: 35492 - RNA, 20 nt, Artificial Sequence
  spacer sequence TTCN PAM
cuagcugaccccccaaggcu

SEQ ID NO: 35493 - RNA, 20 nt, Artificial Sequence
  spacer sequence TTCN PAM
cacagggggcccuggaggcu

SEQ ID NO: 35494 - RNA, 20 nt, Artificial Sequence
  spacer sequence TTCN PAM
cugggguccccuaaccccag

SEQ ID NO: 35495 - RNA, 20 nt, Artificial Sequence
  spacer sequence TTCN PAM
cuuaagccgaggagccccac

SEQ ID NO: 35496 - RNA, 20 nt, Artificial Sequence
  spacer sequence TTCN PAM
ggggguugagguccgggcgu

SEQ ID NO: 35497 - RNA, 20 nt, Artificial Sequence
  spacer sequence TTCN PAM
cagcagggcccuugcugccu

SEQ ID NO: 35498 - RNA, 20 nt, Artificial Sequence
  spacer sequence TTCN PAM
ucucagcagggcccuugcug

SEQ ID NO: 35499 - RNA, 20 nt, Artificial Sequence
  spacer sequence TTCN PAM
uucuucucagcagggcccuu

SEQ ID NO: 35500 - RNA, 20 nt, Artificial Sequence
  spacer sequence TTCN PAM
gcaccccaccugcaggcgcc

SEQ ID NO: 35501 - RNA, 20 nt, Artificial Sequence
  spacer sequence TTCN PAM
accguguccugcaugccgcu

SEQ ID NO: 35502 - RNA, 20 nt, Artificial Sequence
  spacer sequence TTCN PAM
cgugcucgcccgcagaggca

SEQ ID NO: 35503 - RNA, 20 nt, Artificial Sequence
  spacer sequence TTCN PAM
accaaaaugccugccugggg

SEQ ID NO: 35504 - RNA, 20 nt, Artificial Sequence
  spacer sequence TTCN PAM
ggaaauggggugccaggaag

SEQ ID NO: 35505 - RNA, 20 nt, Artificial Sequence
  spacer sequence TTCN PAM
cgaaccugccucucucagca

SEQ ID NO: 35506 - RNA, 20 nt, Artificial Sequence
  spacer sequence TTCN PAM
uggcaccccauuucccgaac

SEQ ID NO: 35507 - RNA, 20 nt, Artificial Sequence
  spacer sequence TTCN PAM
ggacuuaagaugcacauggg

SEQ ID NO: 35508 - RNA, 20 nt, Artificial Sequence
  spacer sequence TTCN PAM
ugccgcccugcccgcgggag

SEQ ID NO: 35509 - RNA, 20 nt, Artificial Sequence
  spacer sequence TTCN PAM
gugggggagucuauccccgc

SEQ ID NO: 35510 - RNA, 20 nt, Artificial Sequence
  spacer sequence TTCN PAM
gcccaccagaguccaggccg

SEQ ID NO: 35511 - RNA, 20 nt, Artificial Sequence
  spacer sequence TTCN PAM
ucaggcagucuaaggagggg

SEQ ID NO: 35512 - RNA, 20 nt, Artificial Sequence
  spacer sequence TTCN PAM
uggaggccuccugguggguc

SEQ ID NO: 35513 - RNA, 20 nt, Artificial Sequence
  spacer sequence TTCN PAM
cagacccuccacaagggucc

SEQ ID NO: 35514 - RNA, 20 nt, Artificial Sequence
  spacer sequence TTCN PAM
cuggggugggcaggagcuca

SEQ ID NO: 35515 - RNA, 20 nt, Artificial Sequence
  spacer sequence TTCN PAM
ugcgucugcggcugcgagac

SEQ ID NO: 35516 - RNA, 20 nt, Artificial Sequence
  spacer sequence TTCN PAM
augaccugcuggcgggggcu

SEQ ID NO: 35517 - RNA, 20 nt, Artificial Sequence
  spacer sequence TTCN PAM
agcugcugcgcuacccaccc

SEQ ID NO: 35518 - RNA, 20 nt, Artificial Sequence
  spacer sequence TTCN PAM
ugcccguggccuuccaugug

SEQ ID NO: 35519 - RNA, 20 nt, Artificial Sequence
  spacer sequence TTCN PAM
augugcuguuugcuuccagc

SEQ ID NO: 35520 - RNA, 20 nt, Artificial Sequence
  spacer sequence TTCN PAM
agccacacacccaggaucac

SEQ ID NO: 35521 - RNA, 20 nt, Artificial Sequence
  spacer sequence TTCN PAM
ccagcagccagcaggaggug

SEQ ID NO: 35522 - RNA, 20 nt, Artificial Sequence
  spacer sequence TTCN PAM
ccccucgcccgggaggccca

SEQ ID NO: 35523 - RNA, 20 nt, Artificial Sequence
  spacer sequence TTCN PAM
gggccuggggcaggggguga

SEQ ID NO: 35524 - RNA, 20 nt, Artificial Sequence
  spacer sequence TTCN PAM
ucaucuggcucauccgguuc

SEQ ID NO: 35525 - RNA, 20 nt, Artificial Sequence
  spacer sequence TTCN PAM
ugcacccaagcuccgccccg

SEQ ID NO: 35526 - RNA, 20 nt, Artificial Sequence
  spacer sequence TTCN PAM
ccgccugcugcccuccuguc

SEQ ID NO: 35527 - RNA, 20 nt, Artificial Sequence
  spacer sequence TTCN PAM
cgggugcuguacagcugugu

SEQ ID NO: 35528 - RNA, 20 nt, Artificial Sequence
  spacer sequence TTCN PAM
gggcccgcauggggccagga

SEQ ID NO: 35529 - RNA, 20 nt, Artificial Sequence
  spacer sequence TTCN PAM
gacuccuggccccaugcggg

SEQ ID NO: 35530 - RNA, 20 nt, Artificial Sequence
  spacer sequence TTCN PAM
cgguuacaucugagcaaaag

SEQ ID NO: 35531 - RNA, 20 nt, Artificial Sequence
  spacer sequence TTCN PAM
agcuacuugagauuggcucu

SEQ ID NO: 35532 - RNA, 20 nt, Artificial Sequence
  spacer sequence TTCN PAM
augugggggugcuaaggcug

SEQ ID NO: 35533 - RNA, 20 nt, Artificial Sequence
  spacer sequence TTCN PAM
aacacuccguuucccgcugu

SEQ ID NO: 35534 - RNA, 20 nt, Artificial Sequence
  spacer sequence TTCN PAM
cgcugugggauggccauggg

SEQ ID NO: 35535 - RNA, 20 nt, Artificial Sequence
  spacer sequence TTCN PAM
ucaucaucccacguacacuu

SEQ ID NO: 35536 - RNA, 20 nt, Artificial Sequence
  spacer sequence TTCN PAM
ccaacugcaaguguacgugg

SEQ ID NO: 35537 - RNA, 20 nt, Artificial Sequence
  spacer sequence TTCN PAM
ugcucuggccuuguggcuuu

SEQ ID NO: 35538 - RNA, 20 nt, Artificial Sequence
  spacer sequence TTCN PAM
ugcucagcacagggggacac

SEQ ID NO: 35539 - RNA, 20 nt, Artificial Sequence
  spacer sequence TTCN PAM
uccacguuccugcucagcac

SEQ ID NO: 35540 - RNA, 20 nt, Artificial Sequence
  spacer sequence TTCN PAM
cugagcugccugcccgcaag

SEQ ID NO: 35541 - RNA, 20 nt, Artificial Sequence
  spacer sequence TTCN PAM
ucugguaggugaggggcuug

SEQ ID NO: 35542 - RNA, 20 nt, Artificial Sequence
  spacer sequence TTCN PAM
ccaccucgaucucgcgggcg

SEQ ID NO: 35543 - RNA, 20 nt, Artificial Sequence
  spacer sequence TTCN PAM
gcccggguagagaacagccc

SEQ ID NO: 35544 - RNA, 20 nt, Artificial Sequence
  spacer sequence TTCN PAM
cuacccgggcagaagccucc

SEQ ID NO: 35545 - RNA, 20 nt, Artificial Sequence
  spacer sequence TTCN PAM
ccccaaugccccccagcaga

SEQ ID NO: 35546 - RNA, 20 nt, Artificial Sequence
  spacer sequence TTCN PAM
ucccgggccgcucgccucau

SEQ ID NO: 35547 - RNA, 20 nt, Artificial Sequence
  spacer sequence TTCN PAM
acaccuguuccucccgggcc

SEQ ID NO: 35548 - RNA, 20 nt, Artificial Sequence
  spacer sequence TTCN PAM
gggcuguggcuagggcaguc

SEQ ID NO: 35549 - RNA, 20 nt, Artificial Sequence
  spacer sequence TTCN PAM
gagccccccuuagggcacug

SEQ ID NO: 35550 - RNA, 20 nt, Artificial Sequence
  spacer sequence TTCN PAM
acccaggccucaguuuccca

SEQ ID NO: 35551 - RNA, 20 nt, Artificial Sequence
  spacer sequence TTCN PAM
caucugggcagaagaguggc

SEQ ID NO: 35552 - RNA, 20 nt, Artificial Sequence
  spacer sequence TTCN PAM
gcccagaugggaaacugagg

SEQ ID NO: 35553 - RNA, 20 nt, Artificial Sequence
  spacer sequence TTCN PAM
ugauuggcaccuggugggga

SEQ ID NO: 35554 - RNA, 20 nt, Artificial Sequence
  spacer sequence TTCN PAM
gaaaggugucucagaggugu

SEQ ID NO: 35555 - RNA, 20 nt, Artificial Sequence
  spacer sequence TTCN PAM
gaaccuggcccaggccagcu

SEQ ID NO: 35556 - RNA, 20 nt, Artificial Sequence
  spacer sequence TTCN PAM
ggucccuccucccugggaag

SEQ ID NO: 35557 - RNA, 20 nt, Artificial Sequence
  spacer sequence TTCN PAM
cagggaggagggaccagaac

SEQ ID NO: 35558 - RNA, 20 nt, Artificial Sequence
  spacer sequence TTCN PAM
ucccaucagccugagaagga

SEQ ID NO: 35559 - RNA, 20 nt, Artificial Sequence
  spacer sequence TTCN PAM
caggcugaugggaggaagga

SEQ ID NO: 35560 - RNA, 20 nt, Artificial Sequence
  spacer sequence TTCN PAM
uuggacguguggucgucagg

SEQ ID NO: 35561 - RNA, 20 nt, Artificial Sequence
  spacer sequence TTCN PAM
gcuucaacgagggugucucc

SEQ ID NO: 35562 - RNA, 20 nt, Artificial Sequence
  spacer sequence TTCN PAM
acgagggugucuccaacgcc

SEQ ID NO: 35563 - RNA, 20 nt, Artificial Sequence
  spacer sequence TTCN PAM
cugagccgcggacaugcccu

SEQ ID NO: 35564 - RNA, 20 nt, Artificial Sequence
  spacer sequence TTCN PAM
cgcagagugcagagacagga

SEQ ID NO: 35565 - RNA, 20 nt, Artificial Sequence
  spacer sequence TTCN PAM
ugucucugcacucugcggga

SEQ ID NO: 35566 - RNA, 20 nt, Artificial Sequence
  spacer sequence TTCN PAM
caggauggugggaguggggc

SEQ ID NO: 35567 - RNA, 20 nt, Artificial Sequence
  spacer sequence TTCN PAM
cuccauccugugagaccacg

SEQ ID NO: 35568 - RNA, 20 nt, Artificial Sequence
  spacer sequence TTCN PAM
agccccacucccaccauccu

SEQ ID NO: 35569 - RNA, 20 nt, Artificial Sequence
  spacer sequence TTCN PAM
cuccauccugugagucccac

SEQ ID NO: 35570 - RNA, 20 nt, Artificial Sequence
  spacer sequence TTCN PAM
acccauggguuguucuucau

SEQ ID NO: 35571 - RNA, 20 nt, Artificial Sequence
  spacer sequence TTCN PAM
ucaucaggucgggguucagg

SEQ ID NO: 35572 - RNA, 20 nt, Artificial Sequence
  spacer sequence TTCN PAM
ucaggucgggguucaggaag

SEQ ID NO: 35573 - RNA, 20 nt, Artificial Sequence
  spacer sequence TTCN PAM
ggaagggguccuuggggauc

SEQ ID NO: 35574 - RNA, 20 nt, Artificial Sequence
  spacer sequence TTCN PAM
ugaaccccgaccugaugaag

SEQ ID NO: 35575 - RNA, 20 nt, Artificial Sequence
  spacer sequence TTCN PAM
gcagccugcgggugggcggg

SEQ ID NO: 35576 - RNA, 20 nt, Artificial Sequence
  spacer sequence TTCN PAM
auagccacgaccaccgccgc

SEQ ID NO: 35577 - RNA, 20 nt, Artificial Sequence
  spacer sequence TTCN PAM
agcgggagauggcguccaag

SEQ ID NO: 35578 - RNA, 20 nt, Artificial Sequence
  spacer sequence TTCN PAM
ucaucuguggcacgucccac

SEQ ID NO: 35579 - RNA, 20 nt, Artificial Sequence
  spacer sequence TTCN PAM
ucuguggcacgucccacucc

SEQ ID NO: 35580 - RNA, 20 nt, Artificial Sequence
  spacer sequence TTCN PAM
gaagcagccagccuggggcu

SEQ ID NO: 35581 - RNA, 20 nt, Artificial Sequence
  spacer sequence TTCN PAM
gaagccccugaccccaugga

SEQ ID NO: 35582 - RNA, 20 nt, Artificial Sequence
  spacer sequence TTCN PAM
uccugugcccuccagcccca

SEQ ID NO: 35583 - RNA, 20 nt, Artificial Sequence
  spacer sequence TTCN PAM
gcucaggccugcggggagca

SEQ ID NO: 35584 - RNA, 20 nt, Artificial Sequence
  spacer sequence TTCN PAM
uccugcgggguucagcucag

SEQ ID NO: 35585 - RNA, 20 nt, Artificial Sequence
  spacer sequence TTCN PAM
cacaaggccccagcucccgc

SEQ ID NO: 35586 - RNA, 20 nt, Artificial Sequence
  spacer sequence TTCN PAM
ugcaguuaauuagucccagu

SEQ ID NO: 35587 - RNA, 20 nt, Artificial Sequence
  spacer sequence TTCN PAM
uaaggugugggggccuaugg

SEQ ID NO: 35588 - RNA, 20 nt, Artificial Sequence
  spacer sequence TTCN PAM
ccugccugcaagggaucuuc

SEQ ID NO: 35589 - RNA, 20 nt, Artificial Sequence
  spacer sequence TTCN PAM
uguccaggaguccuggcucu

SEQ ID NO: 35590 - RNA, 20 nt, Artificial Sequence
  spacer sequence TTCN PAM
gcugcaguuugcuucucugg

SEQ ID NO: 35591 - RNA, 20 nt, Artificial Sequence
  spacer sequence TTCN PAM
cuggcagguggggugugugc

SEQ ID NO: 35592 - RNA, 20 nt, Artificial Sequence
  spacer sequence TTCN PAM
cagacacacuggggacccag

SEQ ID NO: 35593 - RNA, 20 nt, Artificial Sequence
  spacer sequence TTCN PAM
gcuuguggccagccugggaa

SEQ ID NO: 35594 - RNA, 20 nt, Artificial Sequence
  spacer sequence TTCN PAM
caggcuggccacaagcagaa

SEQ ID NO: 35595 - RNA, 20 nt, Artificial Sequence
  spacer sequence TTCN PAM
gaggggugucaaccuguggc

SEQ ID NO: 35596 - RNA, 20 nt, Artificial Sequence
  spacer sequence TTCN PAM
aggcaaguggggguggguug

SEQ ID NO: 35597 - RNA, 20 nt, Artificial Sequence
  spacer sequence TTCN PAM
gcccugucucccaaccuugg

SEQ ID NO: 35598 - RNA, 20 nt, Artificial Sequence
  spacer sequence TTCN PAM
gggagccugccucuggcugu

SEQ ID NO: 35599 - RNA, 20 nt, Artificial Sequence
  spacer sequence TTCN PAM
cagccagaggcaggcucccc

SEQ ID NO: 35600 - RNA, 20 nt, Artificial Sequence
  spacer sequence TTCN PAM
ccaccgggaccccaccagcc

SEQ ID NO: 35601 - RNA, 20 nt, Artificial Sequence
  spacer sequence TTCN PAM
gggggagugaucagggucau

SEQ ID NO: 35602 - RNA, 20 nt, Artificial Sequence
  spacer sequence TTCN PAM
cucccggagacucuggaguu

SEQ ID NO: 35603 - RNA, 20 nt, Artificial Sequence
  spacer sequence TTCN PAM
agcaccccuacccgccccca

SEQ ID NO: 35604 - RNA, 20 nt, Artificial Sequence
  spacer sequence TTCN PAM
cggagacccuacacucagcc

SEQ ID NO: 35605 - RNA, 20 nt, Artificial Sequence
  spacer sequence TTCN PAM
cgcagcugccgccaagccug

SEQ ID NO: 35606 - RNA, 20 nt, Artificial Sequence
  spacer sequence TTCN PAM
ucggaccuaccuugaaaagg

SEQ ID NO: 35607 - RNA, 20 nt, Artificial Sequence
  spacer sequence TTCN PAM
agguagguccgaugaacagg

SEQ ID NO: 35608 - RNA, 20 nt, Artificial Sequence
  spacer sequence TTCN PAM
gggaguccgccaggcagagc

SEQ ID NO: 35609 - RNA, 20 nt, Artificial Sequence
  spacer sequence TTCN PAM
cugaggggccagcuugggcc

SEQ ID NO: 35610 - RNA, 20 nt, Artificial Sequence
  spacer sequence TTCN PAM
acuugaggggguggguuccc

SEQ ID NO: 35611 - RNA, 20 nt, Artificial Sequence
  spacer sequence TTCN PAM
cccuccaguguccugggcca

SEQ ID NO: 35612 - RNA, 20 nt, Artificial Sequence
  spacer sequence TTCN PAM
gagggcaaagggucccagcc

SEQ ID NO: 35613 - RNA, 20 nt, Artificial Sequence
  spacer sequence TTCN PAM
ggugacacucagcugugccc

SEQ ID NO: 35614 - RNA, 20 nt, Artificial Sequence
  spacer sequence TTCN PAM
cagaccaguggccggcacgg

SEQ ID NO: 35615 - RNA, 20 nt, Artificial Sequence
  spacer sequence TTCN PAM
gucugaucugagcugagagu

SEQ ID NO: 35616 - RNA, 20 nt, Artificial Sequence
  spacer sequence TTCN PAM
cuuuggggcuccgcaccugu

SEQ ID NO: 35617 - RNA, 20 nt, Artificial Sequence
  spacer sequence TTCN PAM
ucugacacguuuccccgugu

SEQ ID NO: 35618 - RNA, 20 nt, Artificial Sequence
  spacer sequence TTCN PAM
ccgugucuccucccacccug

SEQ ID NO: 35619 - RNA, 20 nt, Artificial Sequence
  spacer sequence TTCN PAM
gcagggacuguuuggggagc

SEQ ID NO: 35620 - RNA, 20 nt, Artificial Sequence
  spacer sequence TTCN PAM
ccggggguggcccagcuucu

SEQ ID NO: 35621 - RNA, 20 nt, Artificial Sequence
  spacer sequence TTCN PAM
ccagugucacagggaaccgc

SEQ ID NO: 35622 - RNA, 20 nt, Artificial Sequence
  spacer sequence TTCN PAM
cugugacacuggggaaggca

SEQ ID NO: 35623 - RNA, 20 nt, Artificial Sequence
  spacer sequence TTCN PAM
gggaccugagcgccugagag

SEQ ID NO: 35624 - RNA, 20 nt, Artificial Sequence
  spacer sequence TTCN PAM
cggagucacacuggcaggga

SEQ ID NO: 35625 - RNA, 20 nt, Artificial Sequence
  spacer sequence TTCN PAM
agaggcgccucugauccagc

SEQ ID NO: 35626 - RNA, 20 nt, Artificial Sequence
  spacer sequence TTCN PAM
cuaaugugccccaguuccag

SEQ ID NO: 35627 - RNA, 20 nt, Artificial Sequence
  spacer sequence TTCN PAM
gaugcaccuuaguuucuggg

SEQ ID NO: 35628 - RNA, 20 nt, Artificial Sequence
  spacer sequence TTCN PAM
gggcugcugagggcucuccc

SEQ ID NO: 35629 - RNA, 20 nt, Artificial Sequence
  spacer sequence TTCN PAM
acucucuggcgcccaaagug

SEQ ID NO: 35630 - RNA, 20 nt, Artificial Sequence
  spacer sequence TTCN PAM
cugggacagcagguggcuug

SEQ ID NO: 35631 - RNA, 20 nt, Artificial Sequence
  spacer sequence TTCN PAM
cccgccuggcccuggcucca

SEQ ID NO: 35632 - RNA, 20 nt, Artificial Sequence
  spacer sequence TTCN PAM
guggccacucucaggacccc

SEQ ID NO: 35633 - RNA, 20 nt, Artificial Sequence
  spacer sequence TTCN PAM
agaugagcagaugcaaaggc

SEQ ID NO: 35634 - RNA, 20 nt, Artificial Sequence
  spacer sequence TTCN PAM
ggcuuuuggucaauucacug

SEQ ID NO: 35635 - RNA, 20 nt, Artificial Sequence
  spacer sequence TTCN PAM
cuggacccaguaaggucccu

SEQ ID NO: 35636 - RNA, 20 nt, Artificial Sequence
  spacer sequence TTCN PAM
cugggggcacuggccguguu

SEQ ID NO: 35637 - RNA, 20 nt, Artificial Sequence
  spacer sequence TTCN PAM
cugcugagaugcugaggacu

SEQ ID NO: 35638 - RNA, 20 nt, Artificial Sequence
  spacer sequence TTCN PAM
cucaaccuccuccugcccuu

SEQ ID NO: 35639 - RNA, 20 nt, Artificial Sequence
  spacer sequence TTCN PAM
guggcguuucuggucgcugg

SEQ ID NO: 35640 - RNA, 20 nt, Artificial Sequence
  spacer sequence TTCN PAM
ggucgcugggggggcaccag

SEQ ID NO: 35641 - RNA, 20 nt, Artificial Sequence
  spacer sequence TTCN PAM
ggggguccacacgacaccga

SEQ ID NO: 35642 - RNA, 20 nt, Artificial Sequence
  spacer sequence TTCN PAM
gauucuggggguccacacga

SEQ ID NO: 35643 - RNA, 20 nt, Artificial Sequence
  spacer sequence TTCN PAM
agacccccgucuuacugagg

SEQ ID NO: 35644 - RNA, 20 nt, Artificial Sequence
  spacer sequence TTCN PAM
accuuccuaccaaggcugca

SEQ ID NO: 35645 - RNA, 20 nt, Artificial Sequence
  spacer sequence TTCN PAM
uaccaaggcugcacucggaa

SEQ ID NO: 35646 - RNA, 20 nt, Artificial Sequence
  spacer sequence TTCN PAM
gagugcagccuugguaggaa

SEQ ID NO: 35647 - RNA, 20 nt, Artificial Sequence
  spacer sequence TTCN PAM
agacccgaggcugacuccag

SEQ ID NO: 35648 - RNA, 20 nt, Artificial Sequence
  spacer sequence TTCN PAM
gcgauucucauugggaggaa

SEQ ID NO: 35649 - RNA, 20 nt, Artificial Sequence
  spacer sequence TTCN PAM
cauugggaggaauggcagcc

SEQ ID NO: 35650 - RNA, 20 nt, Artificial Sequence
  spacer sequence TTCN PAM
ucccaaugagaaucgcugaa

SEQ ID NO: 35651 - RNA, 20 nt, Artificial Sequence
  spacer sequence TTCN PAM
gaaauuaggccacuaauugg

SEQ ID NO: 35652 - RNA, 20 nt, Artificial Sequence
  spacer sequence TTCN PAM
gaaaggagccccuggccucg

SEQ ID NO: 35653 - RNA, 20 nt, Artificial Sequence
  spacer sequence TTCN PAM
cagccagcggcccaauuagu

SEQ ID NO: 35654 - RNA, 20 nt, Artificial Sequence
  spacer sequence TTCN PAM
gcugcccuagaaauagcugu

SEQ ID NO: 35655 - RNA, 20 nt, Artificial Sequence
  spacer sequence TTCN PAM
agggcagcggaaagagcccu

SEQ ID NO: 35656 - RNA, 20 nt, Artificial Sequence
  spacer sequence TTCN PAM
cccacggucuugguuggcug

SEQ ID NO: 35657 - RNA, 20 nt, Artificial Sequence
  spacer sequence TTCN PAM
cgcugacuuuagggcuuggu

SEQ ID NO: 35658 - RNA, 20 nt, Artificial Sequence
  spacer sequence TTCN PAM
uagcgggaagcugcagcagg

SEQ ID NO: 35659 - RNA, 20 nt, Artificial Sequence
  spacer sequence TTCN PAM
cgcuaggaagggaucagagc

SEQ ID NO: 35660 - RNA, 20 nt, Artificial Sequence
  spacer sequence TTCN PAM
gaguugaggccgcagcgaga

SEQ ID NO: 35661 - RNA, 20 nt, Artificial Sequence
  spacer sequence TTCN PAM
ccggagaguugacugguguc

SEQ ID NO: 35662 - RNA, 20 nt, Artificial Sequence
  spacer sequence TTCN PAM
cccaccacccccgggcugcu

SEQ ID NO: 35663 - RNA, 20 nt, Artificial Sequence
  spacer sequence TTCN PAM
cucagucccugcaaacaaaa

SEQ ID NO: 35664 - RNA, 20 nt, Artificial Sequence
  spacer sequence TTCN PAM
ccaggccccacgcuugcagu

SEQ ID NO: 35665 - RNA, 20 nt, Artificial Sequence
  spacer sequence TTCN PAM
uuauuuccccaggccccacg

SEQ ID NO: 35666 - RNA, 20 nt, Artificial Sequence
  spacer sequence TTCN PAM
uuggugaggagcugccuucg

SEQ ID NO: 35667 - RNA, 20 nt, Artificial Sequence
  spacer sequence TTCN PAM
gucaucugugaaaguuucaa

SEQ ID NO: 35668 - RNA, 20 nt, Artificial Sequence
  spacer sequence TTCN PAM
cagaugacagaaaagucguu

SEQ ID NO: 35669 - RNA, 20 nt, Artificial Sequence
  spacer sequence TTCN PAM
aagugauuuucaaaaacaau

SEQ ID NO: 35670 - RNA, 20 nt, Artificial Sequence
  spacer sequence TTCN PAM
aaaacaauugaagcucuuaa

SEQ ID NO: 35671 - RNA, 20 nt, Artificial Sequence
  spacer sequence TTCN PAM
auuguuuuugaaaaucacuu

SEQ ID NO: 35672 - RNA, 20 nt, Artificial Sequence
  spacer sequence TTCN PAM
gugcuuggguuuaagagcuu

SEQ ID NO: 35673 - RNA, 20 nt, Artificial Sequence
  spacer sequence TTCN PAM
guuguguuuucugugcuugg

SEQ ID NO: 35674 - RNA, 20 nt, Artificial Sequence
  spacer sequence TTCN PAM
agggaugggguggggggagg

SEQ ID NO: 35675 - RNA, 20 nt, Artificial Sequence
  spacer sequence TTCN PAM
agggagucccgggugcgugg

SEQ ID NO: 35676 - RNA, 20 nt, Artificial Sequence
  spacer sequence TTCN PAM
gaguaaaccgagcuaaggca

SEQ ID NO: 35677 - RNA, 20 nt, Artificial Sequence
  spacer sequence TTCN PAM
uacuuaagagacgcccgucu

SEQ ID NO: 35678 - RNA, 20 nt, Artificial Sequence
  spacer sequence TTCN PAM
ggagacgggcgucucuuaag

SEQ ID NO: 35679 - RNA, 20 nt, Artificial Sequence
  spacer sequence TTCN PAM
gguuagcaaagacauaccua

SEQ ID NO: 35680 - RNA, 20 nt, Artificial Sequence
  spacer sequence TTCN PAM
aggaccuccugccucaggcc

SEQ ID NO: 35681 - RNA, 20 nt, Artificial Sequence
  spacer sequence TTCN PAM
guccuuccaggaccuccugc

SEQ ID NO: 35682 - RNA, 20 nt, Artificial Sequence
  spacer sequence TTCN PAM
gaacuugaguguguuuaagg

SEQ ID NO: 35683 - RNA, 20 nt, Artificial Sequence
  spacer sequence TTCN PAM
gaaugggggcagcaccccau

SEQ ID NO: 35684 - RNA, 20 nt, Artificial Sequence
  spacer sequence TTCN PAM
ccuuaaacacacucaaguuc

SEQ ID NO: 35685 - RNA, 20 nt, Artificial Sequence
  spacer sequence TTCN PAM
gaggcccccacugccggcuc

SEQ ID NO: 35686 - RNA, 20 nt, Artificial Sequence
  spacer sequence TTCN PAM
aagaguaccagcucagaagu

SEQ ID NO: 35687 - RNA, 20 nt, Artificial Sequence
  spacer sequence TTCN PAM
gagcugguacucuuggaaga

SEQ ID NO: 35688 - RNA, 20 nt, Artificial Sequence
  spacer sequence TTCN PAM
aaaagagagacacauuugcu

SEQ ID NO: 35689 - RNA, 20 nt, Artificial Sequence
  spacer sequence TTCN PAM
aaggucugugggggaaggga

SEQ ID NO: 35690 - RNA, 20 nt, Artificial Sequence
  spacer sequence TTCN PAM
cccacagaccuuggaaaggu

SEQ ID NO: 35691 - RNA, 20 nt, Artificial Sequence
  spacer sequence TTCN PAM
cuucccccacagaccuugga

SEQ ID NO: 35692 - RNA, 20 nt, Artificial Sequence
  spacer sequence TTCN PAM
gccccaggccacccuccggu

SEQ ID NO: 35693 - RNA, 20 nt, Artificial Sequence
  spacer sequence TTCN PAM
uaggagcccgugauccgcag

SEQ ID NO: 35694 - RNA, 20 nt, Artificial Sequence
  spacer sequence TTCN PAM
ggcuuugggagagucccugc

SEQ ID NO: 35695 - RNA, 20 nt, Artificial Sequence
  spacer sequence TTCN PAM
agcacuuugggaagcugagg

SEQ ID NO: 35696 - RNA, 20 nt, Artificial Sequence
  spacer sequence TTCN PAM
caaagugcuggaaugacagg

SEQ ID NO: 35697 - RNA, 20 nt, Artificial Sequence
  spacer sequence TTCN PAM
aggcucaagggauccucuag

SEQ ID NO: 35698 - RNA, 20 nt, Artificial Sequence
  spacer sequence TTCN PAM
cugcagccuccaccuuccag

SEQ ID NO: 35699 - RNA, 20 nt, Artificial Sequence
  spacer sequence TTCN PAM
agguguccuuaggcaaaauc

SEQ ID NO: 35700 - RNA, 20 nt, Artificial Sequence
  spacer sequence TTCN PAM
ggccucuggcuguccccacg

SEQ ID NO: 35701 - RNA, 20 nt, Artificial Sequence
  spacer sequence TTCN PAM
uucaaacaucccgggcuggg

SEQ ID NO: 35702 - RNA, 20 nt, Artificial Sequence
  spacer sequence TTCN PAM
aacaucccgggcuggguggc

SEQ ID NO: 35703 - RNA, 20 nt, Artificial Sequence
  spacer sequence TTCN PAM
cagcauguccugugguuaga

SEQ ID NO: 35704 - RNA, 20 nt, Artificial Sequence
  spacer sequence TTCN PAM
ggggcuagggaaaccacaga

SEQ ID NO: 35705 - RNA, 20 nt, Artificial Sequence
  spacer sequence TTCN PAM
cuagccccggaagcagcagc

SEQ ID NO: 35706 - RNA, 20 nt, Artificial Sequence
  spacer sequence TTCN PAM
gugguuucccuagccccgga

SEQ ID NO: 35707 - RNA, 20 nt, Artificial Sequence
  spacer sequence TTCN PAM
aaaucugauuggcaaauggg

SEQ ID NO: 35708 - RNA, 20 nt, Artificial Sequence
  spacer sequence TTCN PAM
ggccauccuagcaucuggcu

SEQ ID NO: 35709 - RNA, 20 nt, Artificial Sequence
  spacer sequence TTCN PAM
ggucaguucgggccauccua

SEQ ID NO: 35710 - RNA, 20 nt, Artificial Sequence
  spacer sequence TTCN PAM
aggccugugacccauggggu

SEQ ID NO: 35711 - RNA, 20 nt, Artificial Sequence
  spacer sequence TTCN PAM
cgagacggagcuuggccacc

SEQ ID NO: 35712 - RNA, 20 nt, Artificial Sequence
  spacer sequence TTCN PAM
uggcuaucucuaccacccca

SEQ ID NO: 35713 - RNA, 20 nt, Artificial Sequence
  spacer sequence TTCN PAM
ugccccauggggugguagag

SEQ ID NO: 35714 - RNA, 20 nt, Artificial Sequence
  spacer sequence TTCN PAM
gagcucccaaccagcucagg

SEQ ID NO: 35715 - RNA, 20 nt, Artificial Sequence
  spacer sequence TTCN PAM
ugagcugguugggagcucag

SEQ ID NO: 35716 - RNA, 20 nt, Artificial Sequence
  spacer sequence TTCN PAM
agggccuggccugcgcccac

SEQ ID NO: 35717 - RNA, 20 nt, Artificial Sequence
  spacer sequence TTCN PAM
cugugggcgcaggccaggcc

SEQ ID NO: 35718 - RNA, 20 nt, Artificial Sequence
  spacer sequence TTCN PAM
cacaaggggacaccgcccac

SEQ ID NO: 35719 - RNA, 20 nt, Artificial Sequence
  spacer sequence TTCN PAM
ggggcugcucugggccccag

SEQ ID NO: 35720 - RNA, 20 nt, Artificial Sequence
  spacer sequence TTCN PAM
gcuggcaaagcccugggacc

SEQ ID NO: 35721 - RNA, 20 nt, Artificial Sequence
  spacer sequence TTCN PAM
gccccagccagccuugugca

SEQ ID NO: 35722 - RNA, 20 nt, Artificial Sequence
  spacer sequence TTCN PAM
ucagagccccucccuccccu

SEQ ID NO: 35723 - RNA, 20 nt, Artificial Sequence
  spacer sequence TTCN PAM
ugucgucuacucucuguauu

SEQ ID NO: 35724 - RNA, 20 nt, Artificial Sequence
  spacer sequence TTCN PAM
accucccaggcucaagcaau

SEQ ID NO: 35725 - RNA, 20 nt, Artificial Sequence
  spacer sequence TTCN PAM
accauguuggccaggugguc

SEQ ID NO: 35726 - RNA, 20 nt, Artificial Sequence
  spacer sequence TTCN PAM
ccugccucagccucccgagu

SEQ ID NO: 35727 - RNA, 20 nt, Artificial Sequence
  spacer sequence TTCN PAM
agugauucuccugccucagc

SEQ ID NO: 35728 - RNA, 20 nt, Artificial Sequence
  spacer sequence TTCN PAM
ccguguuggccaggaugguc

SEQ ID NO: 35729 - RNA, 20 nt, Artificial Sequence
  spacer sequence TTCN PAM
ccugccucagccucccgagu

SEQ ID NO: 35730 - RNA, 20 nt, Artificial Sequence
  spacer sequence TTCN PAM
cgccauucuccugccucagc

SEQ ID NO: 35731 - RNA, 20 nt, Artificial Sequence
  spacer sequence TTCN PAM
ugccucuuugagcuccuggg

SEQ ID NO: 35732 - RNA, 20 nt, Artificial Sequence
  spacer sequence TTCN PAM
aaaugucaccucuccccgcg

SEQ ID NO: 35733 - RNA, 20 nt, Artificial Sequence
  spacer sequence TTCN PAM
agggucacaccgcggggaga

SEQ ID NO: 35734 - RNA, 20 nt, Artificial Sequence
  spacer sequence TTCN PAM
cucccgcucccucuggccgc

SEQ ID NO: 35735 - RNA, 20 nt, Artificial Sequence
  spacer sequence TTCN PAM
gucccugcauuuagagaagg

SEQ ID NO: 35736 - RNA, 20 nt, Artificial Sequence
  spacer sequence TTCN PAM
cuaaaugcagggacagaaga

SEQ ID NO: 35737 - RNA, 20 nt, Artificial Sequence
  spacer sequence TTCN PAM
ccaccuguaagagggauccg

SEQ ID NO: 35738 - RNA, 20 nt, Artificial Sequence
  spacer sequence TTCN PAM
cccgccccggccaacuuuuc

SEQ ID NO: 35739 - RNA, 20 nt, Artificial Sequence
  spacer sequence TTCN PAM
accgaccgucgcgcgccguu

SEQ ID NO: 35740 - RNA, 20 nt, Artificial Sequence
  spacer sequence TTCN PAM
gccuugggagauaauuuccg

SEQ ID NO: 35741 - RNA, 20 nt, Artificial Sequence
  spacer sequence TTCN PAM
gggucccggcaggaaagggu

SEQ ID NO: 35742 - RNA, 20 nt, Artificial Sequence
  spacer sequence TTCN PAM
ugccgggacccggaaauuau

SEQ ID NO: 35743 - RNA, 20 nt, Artificial Sequence
  spacer sequence TTCN PAM
gcaacuccaggaccguaaaa

SEQ ID NO: 35744 - RNA, 20 nt, Artificial Sequence
  spacer sequence TTCN PAM
agauauuuuacgguccugga

SEQ ID NO: 35745 - RNA, 20 nt, Artificial Sequence
  spacer sequence TTCN PAM
ccgucuucgagauauuuuac

SEQ ID NO: 35746 - RNA, 20 nt, Artificial Sequence
  spacer sequence TTCN PAM
gcaggggucugcgacuuucg

SEQ ID NO: 35747 - RNA, 20 nt, Artificial Sequence
  spacer sequence TTCN PAM
ggaucaucugauucugcagg

SEQ ID NO: 35748 - RNA, 20 nt, Artificial Sequence
  spacer sequence TTCN PAM
guuguaaaccaagaaguagc

SEQ ID NO: 35749 - RNA, 20 nt, Artificial Sequence
  spacer sequence TTCN PAM
ugguuuacaacugaaaugga

SEQ ID NO: 35750 - RNA, 20 nt, Artificial Sequence
  spacer sequence TTCN PAM
gagcguggcucggcaagguc

SEQ ID NO: 35751 - RNA, 20 nt, Artificial Sequence
  spacer sequence TTCN PAM
ccagagaugguuuugaggcc

SEQ ID NO: 35752 - RNA, 20 nt, Artificial Sequence
  spacer sequence TTCN PAM
cccuuuaaauacggaggccu

SEQ ID NO: 35753 - RNA, 20 nt, Artificial Sequence
  spacer sequence TTCN PAM
uuaccccgcagcccgcuuuc

SEQ ID NO: 35754 - RNA, 20 nt, Artificial Sequence
  spacer sequence TTCN PAM
gagcccacggugggaagaga

SEQ ID NO: 35755 - RNA, 20 nt, Artificial Sequence
  spacer sequence TTCN PAM
caccgugggcucagaaacag

SEQ ID NO: 35756 - RNA, 20 nt, Artificial Sequence
  spacer sequence TTCN PAM
cuucccaccgugggcucaga

SEQ ID NO: 35757 - RNA, 20 nt, Artificial Sequence
  spacer sequence TTCN PAM
gcuucguucuguccuuuugg

SEQ ID NO: 35758 - RNA, 20 nt, Artificial Sequence
  spacer sequence TTCN PAM
uucuguccuuuuggcagccu

SEQ ID NO: 35759 - RNA, 20 nt, Artificial Sequence
  spacer sequence TTCN PAM
guccuuuuggcagccugaau

SEQ ID NO: 35760 - RNA, 20 nt, Artificial Sequence
  spacer sequence TTCN PAM
ggcugccaaaaggacagaac

SEQ ID NO: 35761 - RNA, 20 nt, Artificial Sequence
  spacer sequence TTCN PAM
caccguccuccacaguuucc

SEQ ID NO: 35762 - RNA, 20 nt, Artificial Sequence
  spacer sequence TTCN PAM
uaaaugggaucuggaaugcu

SEQ ID NO: 35763 - RNA, 20 nt, Artificial Sequence
  spacer sequence TTCN PAM
agaucccauuuaggaaacug

SEQ ID NO: 35764 - RNA, 20 nt, Artificial Sequence
  spacer sequence TTCN PAM
ucccuggcacgccugugaga

SEQ ID NO: 35765 - RNA, 20 nt, Artificial Sequence
  spacer sequence TTCN PAM
cuggcacgccugugagaucu

SEQ ID NO: 35766 - RNA, 20 nt, Artificial Sequence
  spacer sequence TTCN PAM
gccucagaucucacaggcgu

SEQ ID NO: 35767 - RNA, 20 nt, Artificial Sequence
  spacer sequence TTCN PAM
guacacuggcuucugccuca

SEQ ID NO: 35768 - RNA, 20 nt, Artificial Sequence
  spacer sequence TTCN PAM
ccagaggccgaccaauauau

SEQ ID NO: 35769 - RNA, 20 nt, Artificial Sequence
  spacer sequence TTCN PAM
ccugacaaacccacuaucau

SEQ ID NO: 35770 - RNA, 20 nt, Artificial Sequence
  spacer sequence TTCN PAM
cggccucccuaaccgcaugg

SEQ ID NO: 35771 - RNA, 20 nt, Artificial Sequence
  spacer sequence TTCN PAM
ugacuuggaccgagccaggc

SEQ ID NO: 35772 - RNA, 20 nt, Artificial Sequence
  spacer sequence TTCN PAM
guuuccugacuuggaccgag

SEQ ID NO: 35773 - RNA, 20 nt, Artificial Sequence
  spacer sequence TTCN PAM
uccguuuccugacuuggacc

SEQ ID NO: 35774 - RNA, 20 nt, Artificial Sequence
  spacer sequence TTCN PAM
gcccuggccugagucacacc

SEQ ID NO: 35775 - RNA, 20 nt, Artificial Sequence
  spacer sequence TTCN PAM
cagcuuucagcccuggccug

SEQ ID NO: 35776 - RNA, 20 nt, Artificial Sequence
  spacer sequence TTCN PAM
uccuccugcccuuggacagg

SEQ ID NO: 35777 - RNA, 20 nt, Artificial Sequence
  spacer sequence TTCN PAM
uggcgcugggacucucucuu

SEQ ID NO: 35778 - RNA, 20 nt, Artificial Sequence
  spacer sequence TTCN PAM
gcucuuguuccuggcgcugg

SEQ ID NO: 35779 - RNA, 20 nt, Artificial Sequence
  spacer sequence TTCN PAM
uuucccucuuuuuuuuuuuu

SEQ ID NO: 35780 - RNA, 20 nt, Artificial Sequence
  spacer sequence TTCN PAM
cucuuuuuuuuuuuuuuuuu

SEQ ID NO: 35781 - RNA, 20 nt, Artificial Sequence
  spacer sequence TTCN PAM
gucucuagccuaggagacag

SEQ ID NO: 35782 - RNA, 20 nt, Artificial Sequence
  spacer sequence TTCN PAM
ccucccagguucaagcgagu

SEQ ID NO: 35783 - RNA, 20 nt, Artificial Sequence
  spacer sequence TTCN PAM
agcgagucuccugccucagu

SEQ ID NO: 35784 - RNA, 20 nt, Artificial Sequence
  spacer sequence TTCN PAM
cgacuagccuggccauggug

SEQ ID NO: 35785 - RNA, 20 nt, Artificial Sequence
  spacer sequence TTCN PAM
aucugggcccccaggcgauu

SEQ ID NO: 35786 - RNA, 20 nt, Artificial Sequence
  spacer sequence TTCN PAM
ccuuggucccccgaccccca

SEQ ID NO: 35787 - RNA, 20 nt, Artificial Sequence
  spacer sequence TTCN PAM
agaggagccugccugggggu

SEQ ID NO: 35788 - RNA, 20 nt, Artificial Sequence
  spacer sequence TTCN PAM
gggugugucugcgagggggu

SEQ ID NO: 35789 - RNA, 20 nt, Artificial Sequence
  spacer sequence TTCN PAM
cccagccaaguaggugcuug

SEQ ID NO: 35790 - RNA, 20 nt, Artificial Sequence
  spacer sequence TTCN PAM
cucccugcauaagcugaucc

SEQ ID NO: 35791 - RNA, 20 nt, Artificial Sequence
  spacer sequence TTCN PAM
cuggaucagcuuaugcaggg

SEQ ID NO: 35792 - RNA, 20 nt, Artificial Sequence
  spacer sequence TTCN PAM
ugaugcuagauucgggcaac

SEQ ID NO: 35793 - RNA, 20 nt, Artificial Sequence
  spacer sequence TTCN PAM
ggcaaccgcuuggcucuaca

SEQ ID NO: 35794 - RNA, 20 nt, Artificial Sequence
  spacer sequence TTCN PAM
gccccccggggcacucccug

SEQ ID NO: 35795 - RNA, 20 nt, Artificial Sequence
  spacer sequence TTCN PAM
agacggaagggcugaggaaa

SEQ ID NO: 35796 - RNA, 20 nt, Artificial Sequence
  spacer sequence TTCN PAM
gucuagaaaaccagccuccu

SEQ ID NO: 35797 - RNA, 20 nt, Artificial Sequence
  spacer sequence TTCN PAM
ucagcccuuccgucuagaaa

SEQ ID NO: 35798 - RNA, 20 nt, Artificial Sequence
  spacer sequence TTCN PAM
gcuuuccucagcccuuccgu

SEQ ID NO: 35799 - RNA, 20 nt, Artificial Sequence
  spacer sequence TTCN PAM
guuuccgcuuuccucagccc

SEQ ID NO: 35800 - RNA, 20 nt, Artificial Sequence
  spacer sequence TTCN PAM
aagcugcuuuucuuguaagg

SEQ ID NO: 35801 - RNA, 20 nt, Artificial Sequence
  spacer sequence TTCN PAM
aagugagcgauccguguuuu

SEQ ID NO: 35802 - RNA, 20 nt, Artificial Sequence
  spacer sequence TTCN PAM
uguaagggugaaagcagaag

SEQ ID NO: 35803 - RNA, 20 nt, Artificial Sequence
  spacer sequence TTCN PAM
cccuuacaagaaaagcagcu

SEQ ID NO: 35804 - RNA, 20 nt, Artificial Sequence
  spacer sequence TTCN PAM
gcuuucacccuuacaagaaa

SEQ ID NO: 35805 - RNA, 20 nt, Artificial Sequence
  spacer sequence TTCN PAM
cuucugcuuucacccuuaca

SEQ ID NO: 35806 - RNA, 20 nt, Artificial Sequence
  spacer sequence TTCN PAM
cagaaguucagauaaacaac

SEQ ID NO: 35807 - RNA, 20 nt, Artificial Sequence
  spacer sequence TTCN PAM
gagaaaccaggagaguaaua

SEQ ID NO: 35808 - RNA, 20 nt, Artificial Sequence
  spacer sequence TTCN PAM
gauaaacaacuuagcuucag

SEQ ID NO: 35809 - RNA, 20 nt, Artificial Sequence
  spacer sequence TTCN PAM
guuuggugacauggaacuuu

SEQ ID NO: 35810 - RNA, 20 nt, Artificial Sequence
  spacer sequence TTCN PAM
augucaccaaacugaagcua

SEQ ID NO: 35811 - RNA, 20 nt, Artificial Sequence
  spacer sequence TTCN PAM
ucucaacaacaaaaaaaaaa

SEQ ID NO: 35812 - RNA, 20 nt, Artificial Sequence
  spacer sequence TTCN PAM
agcgauucuccugccugagc

SEQ ID NO: 35813 - RNA, 20 nt, Artificial Sequence
  spacer sequence TTCN PAM
ccugccugagccucccaagu

SEQ ID NO: 35814 - RNA, 20 nt, Artificial Sequence
  spacer sequence TTCN PAM
guagagaugaggguuugcca

SEQ ID NO: 35815 - RNA, 20 nt, Artificial Sequence
  spacer sequence TTCN PAM
agaccagccuggccaacaug

SEQ ID NO: 35816 - RNA, 20 nt, Artificial Sequence
  spacer sequence TTCN PAM
uauagauuucauuuaacaga

SEQ ID NO: 35817 - RNA, 20 nt, Artificial Sequence
  spacer sequence TTCN PAM
uuuaacagaaggaagggagg

SEQ ID NO: 35818 - RNA, 20 nt, Artificial Sequence
  spacer sequence TTCN PAM
guuaaaugaaaucuauagga

SEQ ID NO: 35819 - RNA, 20 nt, Artificial Sequence
  spacer sequence TTCN PAM
uucuguuaaaugaaaucuau

SEQ ID NO: 35820 - RNA, 20 nt, Artificial Sequence
  spacer sequence TTCN PAM
ucacccacagcaaccucugc

SEQ ID NO: 35821 - RNA, 20 nt, Artificial Sequence
  spacer sequence TTCN PAM
cugaggagggcugggagaug

SEQ ID NO: 35822 - RNA, 20 nt, Artificial Sequence
  spacer sequence TTCN PAM
gaugcaauuuucuauaaaaa

SEQ ID NO: 35823 - RNA, 20 nt, Artificial Sequence
  spacer sequence TTCN PAM
auaaaaaugccgcccaaauc

SEQ ID NO: 35824 - RNA, 20 nt, Artificial Sequence
  spacer sequence TTCN PAM
ugaugucccagauggaucuu

SEQ ID NO: 35825 - RNA, 20 nt, Artificial Sequence
  spacer sequence TTCN PAM
uggcggcuucucccaaacag

SEQ ID NO: 35826 - RNA, 20 nt, Artificial Sequence
  spacer sequence TTCN PAM
cccaaacaggccacaucagg

SEQ ID NO: 35827 - RNA, 20 nt, Artificial Sequence
  spacer sequence TTCN PAM
cugggacauccugauguggc

SEQ ID NO: 35828 - RNA, 20 nt, Artificial Sequence
  spacer sequence TTCN PAM
gggccaagggcgcacacgga

SEQ ID NO: 35829 - RNA, 20 nt, Artificial Sequence
  spacer sequence TTCN PAM
ggagcaggcucggaucuaug

SEQ ID NO: 35830 - RNA, 20 nt, Artificial Sequence
  spacer sequence TTCN PAM
ccgggacguccagugggcuc

SEQ ID NO: 35831 - RNA, 20 nt, Artificial Sequence
  spacer sequence TTCN PAM
ccggacacuugauguggacg

SEQ ID NO: 35832 - RNA, 20 nt, Artificial Sequence
  spacer sequence TTCN PAM
ugaugcccaccuuaccccug

SEQ ID NO: 35833 - RNA, 20 nt, Artificial Sequence
  spacer sequence TTCN PAM
cagccucccaaagugcuggg

SEQ ID NO: 35834 - RNA, 20 nt, Artificial Sequence
  spacer sequence TTCN PAM
aggccugccugggcaacaua

SEQ ID NO: 35835 - RNA, 20 nt, Artificial Sequence
  spacer sequence TTCN PAM
agccugggacacagagcgag

SEQ ID NO: 35836 - RNA, 20 nt, Artificial Sequence
  spacer sequence TTCN PAM
uguuuuuugguuuguuuaga

SEQ ID NO: 35837 - RNA, 20 nt, Artificial Sequence
  spacer sequence TTCN PAM
ccuaugacuaagcgcuuugc

SEQ ID NO: 35838 - RNA, 20 nt, Artificial Sequence
  spacer sequence TTCN PAM
auuuaaguucaccuaugacu

SEQ ID NO: 35839 - RNA, 20 nt, Artificial Sequence
  spacer sequence TTCN PAM
auuaauaguuuccauuuaag

SEQ ID NO: 35840 - RNA, 20 nt, Artificial Sequence
  spacer sequence TTCN PAM
ucauguugccuaggcugguc

SEQ ID NO: 35841 - RNA, 20 nt, Artificial Sequence
  spacer sequence TTCN PAM
guagagacagaguuucguca

SEQ ID NO: 35842 - RNA, 20 nt, Artificial Sequence
  spacer sequence TTCN PAM
ggaugggauuuuuucuguug

SEQ ID NO: 35843 - RNA, 20 nt, Artificial Sequence
  spacer sequence TTCN PAM
guugccuagaaauuguaucu

SEQ ID NO: 35844 - RNA, 20 nt, Artificial Sequence
  spacer sequence TTCN PAM
aggcaacagaaaaaauccca

SEQ ID NO: 35845 - RNA, 20 nt, Artificial Sequence
  spacer sequence TTCN PAM
cauuuaagccuuagauacaa

SEQ ID NO: 35846 - RNA, 20 nt, Artificial Sequence
  spacer sequence TTCN PAM
auuuucacauuuaagccuua

SEQ ID NO: 35847 - RNA, 20 nt, Artificial Sequence
  spacer sequence TTCN PAM
gaggcuacgucccacccucg

SEQ ID NO: 35848 - RNA, 20 nt, Artificial Sequence
  spacer sequence TTCN PAM
caccacagagcuugagcccc

SEQ ID NO: 35849 - RNA, 20 nt, Artificial Sequence
  spacer sequence TTCN PAM
caccauggucuucaguuacc

SEQ ID NO: 35850 - RNA, 20 nt, Artificial Sequence
  spacer sequence TTCN PAM
guuaccccuagagaugccug

SEQ ID NO: 35851 - RNA, 20 nt, Artificial Sequence
  spacer sequence TTCN PAM
ccuuguccugcucuuguggg

SEQ ID NO: 35852 - RNA, 20 nt, Artificial Sequence
  spacer sequence TTCN PAM
cagacuagcagccugcccgc

SEQ ID NO: 35853 - RNA, 20 nt, Artificial Sequence
  spacer sequence TTCN PAM
ccccccacaccugcgagcag

SEQ ID NO: 35854 - RNA, 20 nt, Artificial Sequence
  spacer sequence TTCN PAM
caagagcgucucaagucuga

SEQ ID NO: 35855 - RNA, 20 nt, Artificial Sequence
  spacer sequence TTCN PAM
gggcuggagcacgucguaag

SEQ ID NO: 35856 - RNA, 20 nt, Artificial Sequence
  spacer sequence TTCN PAM
ugcaccugcccucguggagu

SEQ ID NO: 35857 - RNA, 20 nt, Artificial Sequence
  spacer sequence TTCN PAM
uuccugcaccugcccucgug

SEQ ID NO: 35858 - RNA, 20 nt, Artificial Sequence
  spacer sequence TTCN PAM
agcaucggaggacaugcagg

SEQ ID NO: 35859 - RNA, 20 nt, Artificial Sequence
  spacer sequence TTCN PAM
uuggcugcaacccccgacgu

SEQ ID NO: 35860 - RNA, 20 nt, Artificial Sequence
  spacer sequence TTCN PAM
cguuauuccuuggcugcaac

SEQ ID NO: 35861 - RNA, 20 nt, Artificial Sequence
  spacer sequence TTCN PAM
agacccccuucacguuauuc

SEQ ID NO: 35862 - RNA, 20 nt, Artificial Sequence
  spacer sequence TTCN PAM
caaggagauaaaugagggaa

SEQ ID NO: 35863 - RNA, 20 nt, Artificial Sequence
  spacer sequence TTCN PAM
cucauuuaucuccuugggaa

SEQ ID NO: 35864 - RNA, 20 nt, Artificial Sequence
  spacer sequence TTCN PAM
ucccucauuuaucuccuugg

SEQ ID NO: 35865 - RNA, 20 nt, Artificial Sequence
  spacer sequence TTCN PAM
uuguuguucuucccucauuu

SEQ ID NO: 35866 - RNA, 20 nt, Artificial Sequence
  spacer sequence TTCN PAM
ugcuucuuuguuguucuucc

SEQ ID NO: 35867 - RNA, 20 nt, Artificial Sequence
  spacer sequence TTCN PAM
cuguucuugcuucuuuguug

SEQ ID NO: 35868 - RNA, 20 nt, Artificial Sequence
  spacer sequence TTCN PAM
uuuugcauguuucccuguuc

SEQ ID NO: 35869 - RNA, 20 nt, Artificial Sequence
  spacer sequence TTCN PAM
caugaaaaaacauaauugug

SEQ ID NO: 35870 - RNA, 20 nt, Artificial Sequence
  spacer sequence TTCN PAM
ugugaagguggcuccuuguu

SEQ ID NO: 35871 - RNA, 20 nt, Artificial Sequence
  spacer sequence TTCN PAM
ccaagugcugggacuauagg

SEQ ID NO: 35872 - RNA, 20 nt, Artificial Sequence
  spacer sequence TTCN PAM
ccauguuggucaggcugguc

SEQ ID NO: 35873 - RNA, 20 nt, Artificial Sequence
  spacer sequence TTCN PAM
ccugccucagccucccgagu

SEQ ID NO: 35874 - RNA, 20 nt, Artificial Sequence
  spacer sequence TTCN PAM
agcgauucuccugccucagc

SEQ ID NO: 35875 - RNA, 20 nt, Artificial Sequence
  spacer sequence TTCN PAM
acaauuauguuacuguuuuu

SEQ ID NO: 35876 - RNA, 20 nt, Artificial Sequence
  spacer sequence TTCN PAM
acucaucggugagguuuuau

SEQ ID NO: 35877 - RNA, 20 nt, Artificial Sequence
  spacer sequence TTCN PAM
cuccagagcggggacucaac

SEQ ID NO: 35878 - RNA, 20 nt, Artificial Sequence
  spacer sequence TTCN PAM
gucagggcucacuccuucac

SEQ ID NO: 35879 - RNA, 20 nt, Artificial Sequence
  spacer sequence TTCN PAM
ucccugucggggguaaccuc

SEQ ID NO: 35880 - RNA, 20 nt, Artificial Sequence
  spacer sequence TTCN PAM
gugcguaaacauuuggcuuc

SEQ ID NO: 35881 - RNA, 20 nt, Artificial Sequence
  spacer sequence TTCN PAM
uaagacauagaauaaaacca

SEQ ID NO: 35882 - RNA, 20 nt, Artificial Sequence
  spacer sequence TTCN PAM
augucuuaugaagccaaaug

SEQ ID NO: 35883 - RNA, 20 nt, Artificial Sequence
  spacer sequence TTCN PAM
cauccuacuaaaaaccaguc

SEQ ID NO: 35884 - RNA, 20 nt, Artificial Sequence
  spacer sequence TTCN PAM
ugguggcauuuuuugguaga

SEQ ID NO: 35885 - RNA, 20 nt, Artificial Sequence
  spacer sequence TTCN PAM
caccuguaacuuuauauacg

SEQ ID NO: 35886 - RNA, 20 nt, Artificial Sequence
  spacer sequence TTCN PAM
ggccugggcgcucccugggg

SEQ ID NO: 35887 - RNA, 20 nt, Artificial Sequence
  spacer sequence TTCN PAM
cacaugauggccgagagcuc

SEQ ID NO: 35888 - RNA, 20 nt, Artificial Sequence
  spacer sequence TTCN PAM
gcccccgggggacgcuggcc

SEQ ID NO: 35889 - RNA, 20 nt, Artificial Sequence
  spacer sequence TTCN PAM
gggcuggccguccuccgcgg

SEQ ID NO: 35890 - RNA, 20 nt, Artificial Sequence
  spacer sequence TTCN PAM
ggccgcgcuccugcccgcug

SEQ ID NO: 35891 - RNA, 20 nt, Artificial Sequence
  spacer sequence TTCN PAM
ggaaggauccucacccaacg

SEQ ID NO: 35892 - RNA, 20 nt, Artificial Sequence
  spacer sequence TTCN PAM
ggaacccggggucacgggga

SEQ ID NO: 35893 - RNA, 20 nt, Artificial Sequence
  spacer sequence TTCN PAM
caauccuaaaaccauucggg

SEQ ID NO: 35894 - RNA, 20 nt, Artificial Sequence
  spacer sequence TTCN PAM
ggcuuuuguuuacgugggcg

SEQ ID NO: 35895 - RNA, 20 nt, Artificial Sequence
  spacer sequence TTCN PAM
cucuaccagaaacagagcau

SEQ ID NO: 35896 - RNA, 20 nt, Artificial Sequence
  spacer sequence TTCN PAM
gguagagugaauguccacag

SEQ ID NO: 35897 - RNA, 20 nt, Artificial Sequence
  spacer sequence TTCN PAM
ccuuuucacguaaaaauagc

SEQ ID NO: 35898 - RNA, 20 nt, Artificial Sequence
  spacer sequence TTCN PAM
cguaaaaauagcaauaaauc

SEQ ID NO: 35899 - RNA, 20 nt, Artificial Sequence
  spacer sequence TTCN PAM
cgugcaauggauuuauugcu

SEQ ID NO: 35900 - RNA, 20 nt, Artificial Sequence
  spacer sequence TTCN PAM
uuaaaaugcuauguucacgu

SEQ ID NO: 35901 - RNA, 20 nt, Artificial Sequence
  spacer sequence TTCN PAM
ccauaaaaaaaaaauguagu

SEQ ID NO: 35902 - RNA, 20 nt, Artificial Sequence
  spacer sequence TTCN PAM
cacuacauuuuuuuuuuaug

SEQ ID NO: 35903 - RNA, 20 nt, Artificial Sequence
  spacer sequence TTCN PAM
ucccacuacauuuuuuuuuu

SEQ ID NO: 35904 - RNA, 20 nt, Artificial Sequence
  spacer sequence TTCN PAM
uuuucuucccacuacauuuu

SEQ ID NO: 35905 - RNA, 20 nt, Artificial Sequence
  spacer sequence TTCN PAM
caugucugcgucugcuugca

SEQ ID NO: 35906 - RNA, 20 nt, Artificial Sequence
  spacer sequence TTCN PAM
ggaggccaccggcuugcaag

SEQ ID NO: 35907 - RNA, 20 nt, Artificial Sequence
  spacer sequence TTCN PAM
gccccacacuuucaggagag

SEQ ID NO: 35908 - RNA, 20 nt, Artificial Sequence
  spacer sequence TTCN PAM
ggagagugggaaggaggccg

SEQ ID NO: 35909 - RNA, 20 nt, Artificial Sequence
  spacer sequence TTCN PAM
cacucuccugaaaguguggg

SEQ ID NO: 35910 - RNA, 20 nt, Artificial Sequence
  spacer sequence TTCN PAM
ccauguugcccagggugguc

SEQ ID NO: 35911 - RNA, 20 nt, Artificial Sequence
  spacer sequence TTCN PAM
ggugccucagccuccggagu

SEQ ID NO: 35912 - RNA, 20 nt, Artificial Sequence
  spacer sequence TTCN PAM
uauuauuuuuuuuuugagac

SEQ ID NO: 35913 - RNA, 20 nt, Artificial Sequence
  spacer sequence TTCN PAM
cauucuuauuauuuuuuuuu

SEQ ID NO: 35914 - RNA, 20 nt, Artificial Sequence
  spacer sequence TTCN PAM
uucccauucuuauuauuuuu

SEQ ID NO: 35915 - RNA, 20 nt, Artificial Sequence
  spacer sequence TTCN PAM
uagaagugucaggaaaacag

SEQ ID NO: 35916 - RNA, 20 nt, Artificial Sequence
  spacer sequence TTCN PAM
aagaacgguuuccuucccau

SEQ ID NO: 35917 - RNA, 20 nt, Artificial Sequence
  spacer sequence TTCN PAM
ugacacuucuaagaacgguu

SEQ ID NO: 35918 - RNA, 20 nt, Artificial Sequence
  spacer sequence TTCN PAM
aggguccccgaggucaaacc

SEQ ID NO: 35919 - RNA, 20 nt, Artificial Sequence
  spacer sequence TTCN PAM
ggguccccuuugagaagcau

SEQ ID NO: 35920 - RNA, 20 nt, Artificial Sequence
  spacer sequence TTCN PAM
caaaggggacccagaaagcu

SEQ ID NO: 35921 - RNA, 20 nt, Artificial Sequence
  spacer sequence TTCN PAM
uucauucagagauggagucu

SEQ ID NO: 35922 - RNA, 20 nt, Artificial Sequence
  spacer sequence TTCN PAM
uucagagauggagucuugcu

SEQ ID NO: 35923 - RNA, 20 nt, Artificial Sequence
  spacer sequence TTCN PAM
gagauggagucuugcucugu

SEQ ID NO: 35924 - RNA, 20 nt, Artificial Sequence
  spacer sequence TTCN PAM
ccucccggguucaagcgauu

SEQ ID NO: 35925 - RNA, 20 nt, Artificial Sequence
  spacer sequence TTCN PAM
agcgauucuccugccucagc

SEQ ID NO: 35926 - RNA, 20 nt, Artificial Sequence
  spacer sequence TTCN PAM
ccugccucagccucccgagu

SEQ ID NO: 35927 - RNA, 20 nt, Artificial Sequence
  spacer sequence TTCN PAM
ccauguuggccaggcugguc

SEQ ID NO: 35928 - RNA, 20 nt, Artificial Sequence
  spacer sequence TTCN PAM
agaccagccuggccaacaug

SEQ ID NO: 35929 - RNA, 20 nt, Artificial Sequence
  spacer sequence TTCN PAM
ugaucucaagugauccaccu

SEQ ID NO: 35930 - RNA, 20 nt, Artificial Sequence
  spacer sequence TTCN PAM
acaaaaagauuuaaaagcag

SEQ ID NO: 35931 - RNA, 20 nt, Artificial Sequence
  spacer sequence TTCN PAM
gaguagaaaccagcuugaga

SEQ ID NO: 35932 - RNA, 20 nt, Artificial Sequence
  spacer sequence TTCN PAM
acucugaaaacuguaauaac

SEQ ID NO: 35933 - RNA, 20 nt, Artificial Sequence
  spacer sequence TTCN PAM
caagcugguuucuacucuga

SEQ ID NO: 35934 - RNA, 20 nt, Artificial Sequence
  spacer sequence TTCN PAM
gaccucagugacucuggacu

SEQ ID NO: 35935 - RNA, 20 nt, Artificial Sequence
  spacer sequence TTCN PAM
ccaacaauucggaccucagu

SEQ ID NO: 35936 - RNA, 20 nt, Artificial Sequence
  spacer sequence TTCN PAM
gugaguaauuccccaacaau

SEQ ID NO: 35937 - RNA, 20 nt, Artificial Sequence
  spacer sequence TTCN PAM
gggguuucugugaguaauuc

SEQ ID NO: 35938 - RNA, 20 nt, Artificial Sequence
  spacer sequence TTCN PAM
ccucagcugcuucugggguu

SEQ ID NO: 35939 - RNA, 20 nt, Artificial Sequence
  spacer sequence TTCN PAM
gcacagccuggcuguacucg

SEQ ID NO: 35940 - RNA, 20 nt, Artificial Sequence
  spacer sequence TTCN PAM
cuuuugagguugguggaaau

SEQ ID NO: 35941 - RNA, 20 nt, Artificial Sequence
  spacer sequence TTCN PAM
accaaccucaaaagagaaga

SEQ ID NO: 35942 - RNA, 20 nt, Artificial Sequence
  spacer sequence TTCN PAM
cccauaaugacaucagccca

SEQ ID NO: 35943 - RNA, 20 nt, Artificial Sequence
  spacer sequence TTCN PAM
agcaauucuucugccucagc

SEQ ID NO: 35944 - RNA, 20 nt, Artificial Sequence
  spacer sequence TTCN PAM
ucugccucagccucccgagu

SEQ ID NO: 35945 - RNA, 20 nt, Artificial Sequence
  spacer sequence TTCN PAM
gccucagccucccgaguagc

SEQ ID NO: 35946 - RNA, 20 nt, Artificial Sequence
  spacer sequence TTCN PAM
ccauguuggccagacuggua

SEQ ID NO: 35947 - RNA, 20 nt, Artificial Sequence
  spacer sequence TTCN PAM
auaccagucuggccaacaug

SEQ ID NO: 35948 - RNA, 20 nt, Artificial Sequence
  spacer sequence TTCN PAM
agaggcugaggcagauggau

SEQ ID NO: 35949 - RNA, 20 nt, Artificial Sequence
  spacer sequence TTCN PAM
ggucucaagcgauccuccug

SEQ ID NO: 35950 - RNA, 20 nt, Artificial Sequence
  spacer sequence TTCN PAM
ugucaucccagcacuuugcg

SEQ ID NO: 35951 - RNA, 20 nt, Artificial Sequence
  spacer sequence TTCN PAM
uuugggcagcuguggguuuu

SEQ ID NO: 35952 - RNA, 20 nt, Artificial Sequence
  spacer sequence TTCN PAM
gaaacacugaggagacagag

SEQ ID NO: 35953 - RNA, 20 nt, Artificial Sequence
  spacer sequence TTCN PAM
gaaaacccacagcugcccaa

SEQ ID NO: 35954 - RNA, 20 nt, Artificial Sequence
  spacer sequence TTCN PAM
cgccaguguggggugucacc

SEQ ID NO: 35955 - RNA, 20 nt, Artificial Sequence
  spacer sequence TTCN PAM
ccgaggggccuuuccccauc

SEQ ID NO: 35956 - RNA, 20 nt, Artificial Sequence
  spacer sequence TTCN PAM
ccauccugggacaguucccg

SEQ ID NO: 35957 - RNA, 20 nt, Artificial Sequence
  spacer sequence TTCN PAM
cgucuggcugccugagcacc

SEQ ID NO: 35958 - RNA, 20 nt, Artificial Sequence
  spacer sequence TTCN PAM
cagcccaggggugcucaggc

SEQ ID NO: 35959 - RNA, 20 nt, Artificial Sequence
  spacer sequence TTCN PAM
uggacuucccuugguuuugg

SEQ ID NO: 35960 - RNA, 20 nt, Artificial Sequence
  spacer sequence TTCN PAM
cuugguuuugguggucuggg

SEQ ID NO: 35961 - RNA, 20 nt, Artificial Sequence
  spacer sequence TTCN PAM
uccucaaaaccgcccagacc

SEQ ID NO: 35962 - RNA, 20 nt, Artificial Sequence
  spacer sequence TTCN PAM
uagaaggucccucaaccggg

SEQ ID NO: 35963 - RNA, 20 nt, Artificial Sequence
  spacer sequence TTCN PAM
aggaaaucccgaccuuccuc

SEQ ID NO: 35964 - RNA, 20 nt, Artificial Sequence
  spacer sequence TTCN PAM
cgaggcuagaagggaccugu

SEQ ID NO: 35965 - RNA, 20 nt, Artificial Sequence
  spacer sequence TTCN PAM
agccucgagaaaaguauggu

SEQ ID NO: 35966 - RNA, 20 nt, Artificial Sequence
  spacer sequence TTCN PAM
cuguaggcacccgugucccu

SEQ ID NO: 35967 - RNA, 20 nt, Artificial Sequence
  spacer sequence TTCN PAM
ccucaccuccucccagugcc

SEQ ID NO: 35968 - RNA, 20 nt, Artificial Sequence
  spacer sequence TTCN PAM
cugggguuccccucaccucc

SEQ ID NO: 35969 - RNA, 20 nt, Artificial Sequence
  spacer sequence TTCN PAM
aggccugacccuacgugacc

SEQ ID NO: 35970 - RNA, 20 nt, Artificial Sequence
  spacer sequence TTCN PAM
gcaccccuccuggugcucag

SEQ ID NO: 35971 - RNA, 20 nt, Artificial Sequence
  spacer sequence TTCN PAM
cgcuggguagaccccugccc

SEQ ID NO: 35972 - RNA, 20 nt, Artificial Sequence
  spacer sequence TTCN PAM
uuuuuuuuuuuuuuuuuuuu

SEQ ID NO: 35973 - RNA, 20 nt, Artificial Sequence
  spacer sequence TTCN PAM
cgccauucuccugccucagc

SEQ ID NO: 35974 - RNA, 20 nt, Artificial Sequence
  spacer sequence TTCN PAM
ccugccucagccucccgagu

SEQ ID NO: 35975 - RNA, 20 nt, Artificial Sequence
  spacer sequence TTCN PAM
ccgugucagccaggaugguc

SEQ ID NO: 35976 - RNA, 20 nt, Artificial Sequence
  spacer sequence TTCN PAM
uggggggcucugggucucug

SEQ ID NO: 35977 - RNA, 20 nt, Artificial Sequence
  spacer sequence TTCN PAM
cugcacaggccucagcccac

SEQ ID NO: 35978 - RNA, 20 nt, Artificial Sequence
  spacer sequence TTCN PAM
cgugagacugccuggagggg

SEQ ID NO: 35979 - RNA, 20 nt, Artificial Sequence
  spacer sequence TTCN PAM
ggccgccuuuccccggaacc

SEQ ID NO: 35980 - RNA, 20 nt, Artificial Sequence
  spacer sequence TTCN PAM
ccggaacccgcagcggccuu

SEQ ID NO: 35981 - RNA, 20 nt, Artificial Sequence
  spacer sequence TTCN PAM
ggggaaaggcggccugaacg

SEQ ID NO: 35982 - RNA, 20 nt, Artificial Sequence
  spacer sequence TTCN PAM
ggaggcugcuucuuggugac

SEQ ID NO: 35983 - RNA, 20 nt, Artificial Sequence
  spacer sequence TTCN PAM
uggugacugggggcuccuug

SEQ ID NO: 35984 - RNA, 20 nt, Artificial Sequence
  spacer sequence TTCN PAM
gggucccugagcugcaaugc

SEQ ID NO: 35985 - RNA, 20 nt, Artificial Sequence
  spacer sequence TTCN PAM
gccgcugaagacucggaguc

SEQ ID NO: 35986 - RNA, 20 nt, Artificial Sequence
  spacer sequence TTCN PAM
gcggcagaacgugguccucc

SEQ ID NO: 35987 - RNA, 20 nt, Artificial Sequence
  spacer sequence TTCN PAM
cgcuccgucuugccaggcga

SEQ ID NO: 35988 - RNA, 20 nt, Artificial Sequence
  spacer sequence TTCN PAM
cacaccggcugucgccagga

SEQ ID NO: 35989 - RNA, 20 nt, Artificial Sequence
  spacer sequence TTCN PAM
uccccuagaaaaagcacguu

SEQ ID NO: 35990 - RNA, 20 nt, Artificial Sequence
  spacer sequence TTCN PAM
aggggaggaaacaggcuuuu

SEQ ID NO: 35991 - RNA, 20 nt, Artificial Sequence
  spacer sequence TTCN PAM
aucgucacucagcuaaaaac

SEQ ID NO: 35992 - RNA, 20 nt, Artificial Sequence
  spacer sequence TTCN PAM
cgccgccuuugcucagcgcg

SEQ ID NO: 35993 - RNA, 20 nt, Artificial Sequence
  spacer sequence TTCN PAM
ugcagacccucggccugucu

SEQ ID NO: 35994 - RNA, 20 nt, Artificial Sequence
  spacer sequence TTCN PAM
uauagcauuaaaagcaggaa

SEQ ID NO: 35995 - RNA, 20 nt, Artificial Sequence
  spacer sequence TTCN PAM
ugcuuuuaaugcuauaggaa

SEQ ID NO: 35996 - RNA, 20 nt, Artificial Sequence
  spacer sequence TTCN PAM
uuccugcuuuuaaugcuaua

SEQ ID NO: 35997 - RNA, 20 nt, Artificial Sequence
  spacer sequence TTCN PAM
uggggagcagggcugguucu

SEQ ID NO: 35998 - RNA, 20 nt, Artificial Sequence
  spacer sequence TTCN PAM
guuccuggggagcagggcug

SEQ ID NO: 35999 - RNA, 20 nt, Artificial Sequence
  spacer sequence TTCN PAM
guggcucaucuucagagaag

SEQ ID NO: 36000 - RNA, 20 nt, Artificial Sequence
  spacer sequence TTCN PAM
gagaagccacuguugagugg

SEQ ID NO: 36001 - RNA, 20 nt, Artificial Sequence
  spacer sequence TTCN PAM
cugaagaugagccacagaag

SEQ ID NO: 36002 - RNA, 20 nt, Artificial Sequence
  spacer sequence TTCN PAM
cuuuuuuaucccaggcugga

SEQ ID NO: 36003 - RNA, 20 nt, Artificial Sequence
  spacer sequence TTCN PAM
agugauucuccugccucagc

SEQ ID NO: 36004 - RNA, 20 nt, Artificial Sequence
  spacer sequence TTCN PAM
ccugccucagccuccugagu

SEQ ID NO: 36005 - RNA, 20 nt, Artificial Sequence
  spacer sequence TTCN PAM
ccaugcugcccaggcuaguc

SEQ ID NO: 36006 - RNA, 20 nt, Artificial Sequence
  spacer sequence TTCN PAM
caucuuaacgcccacuugcc

SEQ ID NO: 36007 - RNA, 20 nt, Artificial Sequence
  spacer sequence TTCN PAM
gcccccacggugccuggggg

SEQ ID NO: 36008 - RNA, 20 nt, Artificial Sequence
  spacer sequence TTCN PAM
cugugcaggacacaggccaa

SEQ ID NO: 36009 - RNA, 20 nt, Artificial Sequence
  spacer sequence TTCN PAM
gcuuuggccuguguccugca

SEQ ID NO: 36010 - RNA, 20 nt, Artificial Sequence
  spacer sequence TTCN PAM
uccugccuccuucugcuuug

SEQ ID NO: 36011 - RNA, 20 nt, Artificial Sequence
  spacer sequence TTCN PAM
uuccuccugccuccuucugc

SEQ ID NO: 36012 - RNA, 20 nt, Artificial Sequence
  spacer sequence TTCN PAM
gacacagcaggcucgugggu

SEQ ID NO: 36013 - RNA, 20 nt, Artificial Sequence
  spacer sequence TTCN PAM
ggaaccagacugccuggguu

SEQ ID NO: 36014 - RNA, 20 nt, Artificial Sequence
  spacer sequence TTCN PAM
agaauuaguccugucccuga

SEQ ID NO: 36015 - RNA, 20 nt, Artificial Sequence
  spacer sequence TTCN PAM
cacucuggugguguuaccuu

SEQ ID NO: 36016 - RNA, 20 nt, Artificial Sequence
  spacer sequence TTCN PAM
gccuacgugguuuuaaccuc

SEQ ID NO: 36017 - RNA, 20 nt, Artificial Sequence
  spacer sequence TTCN PAM
ucaguugugaauuggggcua

SEQ ID NO: 36018 - RNA, 20 nt, Artificial Sequence
  spacer sequence TTCN PAM
caacugaugaaaccagagca

SEQ ID NO: 36019 - RNA, 20 nt, Artificial Sequence
  spacer sequence TTCN PAM
uaccuaacaggugugaggau

SEQ ID NO: 36020 - RNA, 20 nt, Artificial Sequence
  spacer sequence TTCN PAM
ccaccauugucaccaucauc

SEQ ID NO: 36021 - RNA, 20 nt, Artificial Sequence
  spacer sequence TTCN PAM
ccgucaucaucaccaucacu

SEQ ID NO: 36022 - RNA, 20 nt, Artificial Sequence
  spacer sequence TTCN PAM
ccaucaucaucaccaucacu

SEQ ID NO: 36023 - RNA, 20 nt, Artificial Sequence
  spacer sequence TTCN PAM
ccaucaucaccaucacuaca

SEQ ID NO: 36024 - RNA, 20 nt, Artificial Sequence
  spacer sequence TTCN PAM
ccaucaucacuacagucuuc

SEQ ID NO: 36025 - RNA, 20 nt, Artificial Sequence
  spacer sequence TTCN PAM
ccaucaucaccaucacuagu

SEQ ID NO: 36026 - RNA, 20 nt, Artificial Sequence
  spacer sequence TTCN PAM
ccaucaucaccaucacuagu

SEQ ID NO: 36027 - RNA, 20 nt, Artificial Sequence
  spacer sequence TTCN PAM
ccaucaucaucaccaucacu

SEQ ID NO: 36028 - RNA, 20 nt, Artificial Sequence
  spacer sequence TTCN PAM
gcaacauggaggucuggcau

SEQ ID NO: 36029 - RNA, 20 nt, Artificial Sequence
  spacer sequence TTCN PAM
auaguaaaagucaggugguu

SEQ ID NO: 36030 - RNA, 20 nt, Artificial Sequence
  spacer sequence TTCN PAM
caguccacguguauuccaua

SEQ ID NO: 36031 - RNA, 20 nt, Artificial Sequence
  spacer sequence TTCN PAM
uuuucaccucccuagaguca

SEQ ID NO: 36032 - RNA, 20 nt, Artificial Sequence
  spacer sequence TTCN PAM
ccucccuagagucauuucca

SEQ ID NO: 36033 - RNA, 20 nt, Artificial Sequence
  spacer sequence TTCN PAM
auuaaaucagaaaauaggcg

SEQ ID NO: 36034 - RNA, 20 nt, Artificial Sequence
  spacer sequence TTCN PAM
gauuuaauggaaaugacucu

SEQ ID NO: 36035 - RNA, 20 nt, Artificial Sequence
  spacer sequence TTCN PAM
caacgccuauuuucugauuu

SEQ ID NO: 36036 - RNA, 20 nt, Artificial Sequence
  spacer sequence TTCN PAM
cacucaacuugcucuuuuuu

SEQ ID NO: 36037 - RNA, 20 nt, Artificial Sequence
  spacer sequence TTCN PAM
uguuaagucauggaagggcu

SEQ ID NO: 36038 - RNA, 20 nt, Artificial Sequence
  spacer sequence TTCN PAM
augacuuaacaggaauccuc

SEQ ID NO: 36039 - RNA, 20 nt, Artificial Sequence
  spacer sequence TTCN PAM
acaugcacuggggccaccag

SEQ ID NO: 36040 - RNA, 20 nt, Artificial Sequence
  spacer sequence TTCN PAM
aagcccaagucucuuucagg

SEQ ID NO: 36041 - RNA, 20 nt, Artificial Sequence
  spacer sequence TTCN PAM
gggaguuaagaacacuugug

SEQ ID NO: 36042 - RNA, 20 nt, Artificial Sequence
  spacer sequence TTCN PAM
uaacucccugaaagagacuu

SEQ ID NO: 36043 - RNA, 20 nt, Artificial Sequence
  spacer sequence TTCN PAM
ccaaaaauaggcacaagugu

SEQ ID NO: 36044 - RNA, 20 nt, Artificial Sequence
  spacer sequence TTCN PAM
uuccccaaaaauaggcacaa

SEQ ID NO: 36045 - RNA, 20 nt, Artificial Sequence
  spacer sequence TTCN PAM
uuauuccaggugucaggugu

SEQ ID NO: 36046 - RNA, 20 nt, Artificial Sequence
  spacer sequence TTCN PAM
aggugucagguguaagacau

SEQ ID NO: 36047 - RNA, 20 nt, Artificial Sequence
  spacer sequence TTCN PAM
cugaaagagugaacccagga

SEQ ID NO: 36048 - RNA, 20 nt, Artificial Sequence
  spacer sequence TTCN PAM
gugaaacagagcuugugcuc

SEQ ID NO: 36049 - RNA, 20 nt, Artificial Sequence
  spacer sequence TTCN PAM
cucuuucagugaaacagagc

SEQ ID NO: 36050 - RNA, 20 nt, Artificial Sequence
  spacer sequence TTCN PAM
ccaccccccacuccagcauc

SEQ ID NO: 36051 - RNA, 20 nt, Artificial Sequence
  spacer sequence TTCN PAM
ugagggccccgcagugccga

SEQ ID NO: 36052 - RNA, 20 nt, Artificial Sequence
  spacer sequence TTCN PAM
cucugagcauguccuugugg

SEQ ID NO: 36053 - RNA, 20 nt, Artificial Sequence
  spacer sequence TTCN PAM
cagagugaggacccauuuca

SEQ ID NO: 36054 - RNA, 20 nt, Artificial Sequence
  spacer sequence TTCN PAM
gcuccuccccucacuccaca

SEQ ID NO: 36055 - RNA, 20 nt, Artificial Sequence
  spacer sequence TTCN PAM
ccuccugguuccugccucau

SEQ ID NO: 36056 - RNA, 20 nt, Artificial Sequence
  spacer sequence TTCN PAM
ugccucauuggguuuuggaa

SEQ ID NO: 36057 - RNA, 20 nt, Artificial Sequence
  spacer sequence TTCN PAM
aaaacccaaugaggcaggaa

SEQ ID NO: 36058 - RNA, 20 nt, Artificial Sequence
  spacer sequence TTCN PAM
aggagccccucagucuccca

SEQ ID NO: 36059 - RNA, 20 nt, Artificial Sequence
  spacer sequence TTCN PAM
ucuaagaucaggccccagca

SEQ ID NO: 36060 - RNA, 20 nt, Artificial Sequence
  spacer sequence TTCN PAM
aggcccucaaccacaacaca

SEQ ID NO: 36061 - RNA, 20 nt, Artificial Sequence
  spacer sequence TTCN PAM
ugacccgaaaccacgccaca

SEQ ID NO: 36062 - RNA, 20 nt, Artificial Sequence
  spacer sequence TTCN PAM
ggucaugaaucucgcucccc

SEQ ID NO: 36063 - RNA, 20 nt, Artificial Sequence
  spacer sequence TTCN PAM
gccucuguugaucucaguug

SEQ ID NO: 36064 - RNA, 20 nt, Artificial Sequence
  spacer sequence TTCN PAM
cagagcuucucuucugacua

SEQ ID NO: 36065 - RNA, 20 nt, Artificial Sequence
  spacer sequence TTCN PAM
cuucugacuaaaaccagcaa

SEQ ID NO: 36066 - RNA, 20 nt, Artificial Sequence
  spacer sequence TTCN PAM
gacuaaaaccagcaacuccu

SEQ ID NO: 36067 - RNA, 20 nt, Artificial Sequence
  spacer sequence TTCN PAM
uucuucacggugauuccguu

SEQ ID NO: 36068 - RNA, 20 nt, Artificial Sequence
  spacer sequence TTCN PAM
ucacggugauuccguuccca

SEQ ID NO: 36069 - RNA, 20 nt, Artificial Sequence
  spacer sequence TTCN PAM
cggugauuccguucccagag

SEQ ID NO: 36070 - RNA, 20 nt, Artificial Sequence
  spacer sequence TTCN PAM
guucccagaggggagaauug

SEQ ID NO: 36071 - RNA, 20 nt, Artificial Sequence
  spacer sequence TTCN PAM
cagaggggagaauuggaaua

SEQ ID NO: 36072 - RNA, 20 nt, Artificial Sequence
  spacer sequence TTCN PAM
ccccucugggaacggaauca

SEQ ID NO: 36073 - RNA, 20 nt, Artificial Sequence
  spacer sequence TTCN PAM
aauucuccccucugggaacg

SEQ ID NO: 36074 - RNA, 20 nt, Artificial Sequence
  spacer sequence TTCN PAM
gucuugguccccccaagcag

SEQ ID NO: 36075 - RNA, 20 nt, Artificial Sequence
  spacer sequence TTCN PAM
uuccuuccuuccuuccuucc

SEQ ID NO: 36076 - RNA, 20 nt, Artificial Sequence
  spacer sequence TTCN PAM
uuccuuccuuccuuccuuuu

SEQ ID NO: 36077 - RNA, 20 nt, Artificial Sequence
  spacer sequence TTCN PAM
uuccuuccuuccuuuuuuag

SEQ ID NO: 36078 - RNA, 20 nt, Artificial Sequence
  spacer sequence TTCN PAM
uuccuuccuuuuuuagacag

SEQ ID NO: 36079 - RNA, 20 nt, Artificial Sequence
  spacer sequence TTCN PAM
uuccuuuuuuagacagaguc

SEQ ID NO: 36080 - RNA, 20 nt, Artificial Sequence
  spacer sequence TTCN PAM
uuuuuuagacagagucucgc

SEQ ID NO: 36081 - RNA, 20 nt, Artificial Sequence
  spacer sequence TTCN PAM
gugagcugagaucgcgccuc

SEQ ID NO: 36082 - RNA, 20 nt, Artificial Sequence
  spacer sequence TTCN PAM
ccugccucagccccccgagu

SEQ ID NO: 36083 - RNA, 20 nt, Artificial Sequence
  spacer sequence TTCN PAM
agcaauucuccugccuuagc

SEQ ID NO: 36084 - RNA, 20 nt, Artificial Sequence
  spacer sequence TTCN PAM
ccugccuuagccccccgagu

SEQ ID NO: 36085 - RNA, 20 nt, Artificial Sequence
  spacer sequence TTCN PAM
cgauguugguccggcugguc

SEQ ID NO: 36086 - RNA, 20 nt, Artificial Sequence
  spacer sequence TTCN PAM
agaccagccggaccaacauc

SEQ ID NO: 36087 - RNA, 20 nt, Artificial Sequence
  spacer sequence TTCN PAM
ccuaagguuggaguuugaga

SEQ ID NO: 36088 - RNA, 20 nt, Artificial Sequence
  spacer sequence TTCN PAM
auuguccuucuaaaagcccu

SEQ ID NO: 36089 - RNA, 20 nt, Artificial Sequence
  spacer sequence TTCN PAM
aaaagcccuuuugucuuuuu

SEQ ID NO: 36090 - RNA, 20 nt, Artificial Sequence
  spacer sequence TTCN PAM
aaaaagacaaaagggcuuuu

SEQ ID NO: 36091 - RNA, 20 nt, Artificial Sequence
  spacer sequence TTCN PAM
ucaaaaaagacaaaagggcu

SEQ ID NO: 36092 - RNA, 20 nt, Artificial Sequence
  spacer sequence TTCN PAM
uccccucagaagccuuuucu

SEQ ID NO: 36093 - RNA, 20 nt, Artificial Sequence
  spacer sequence TTCN PAM
ccucagaagccuuuucugcu

SEQ ID NO: 36094 - RNA, 20 nt, Artificial Sequence
  spacer sequence TTCN PAM
gaggggaagaacaaauaggu

SEQ ID NO: 36095 - RNA, 20 nt, Artificial Sequence
  spacer sequence TTCN PAM
gcugcccccuucccugaccu

SEQ ID NO: 36096 - RNA, 20 nt, Artificial Sequence
  spacer sequence TTCN PAM
cugaccuagugaggauacaa

SEQ ID NO: 36097 - RNA, 20 nt, Artificial Sequence
  spacer sequence TTCN PAM
acguugcugaaccacccacu

SEQ ID NO: 36098 - RNA, 20 nt, Artificial Sequence
  spacer sequence TTCN PAM
gcaacguggaaaccacugcc

SEQ ID NO: 36099 - RNA, 20 nt, Artificial Sequence
  spacer sequence TTCN PAM
uuuguucgcugccgcgugcu

SEQ ID NO: 36100 - RNA, 20 nt, Artificial Sequence
  spacer sequence TTCN PAM
cugccgcgugcuugucaauc

SEQ ID NO: 36101 - RNA, 20 nt, Artificial Sequence
  spacer sequence TTCN PAM
uccuauggauccgucuuuug

SEQ ID NO: 36102 - RNA, 20 nt, Artificial Sequence
  spacer sequence TTCN PAM
gcgacuggggccugcaaauu

SEQ ID NO: 36103 - RNA, 20 nt, Artificial Sequence
  spacer sequence TTCN PAM
guccucuuaaauucugcgac

SEQ ID NO: 36104 - RNA, 20 nt, Artificial Sequence
  spacer sequence TTCN PAM
ucuguccucuuaaauucugc

SEQ ID NO: 36105 - RNA, 20 nt, Artificial Sequence
  spacer sequence TTCN PAM
caacagccuccuucaccacc

SEQ ID NO: 36106 - RNA, 20 nt, Artificial Sequence
  spacer sequence TTCN PAM
ccaccacaaccccacuggcu

SEQ ID NO: 36107 - RNA, 20 nt, Artificial Sequence
  spacer sequence TTCN PAM
acgagcgugucacacguaag

SEQ ID NO: 36108 - RNA, 20 nt, Artificial Sequence
  spacer sequence TTCN PAM
ugagaacaaagcguuaucac

SEQ ID NO: 36109 - RNA, 20 nt, Artificial Sequence
  spacer sequence TTCN PAM
caugaaaagccacugugucu

SEQ ID NO: 36110 - RNA, 20 nt, Artificial Sequence
  spacer sequence TTCN PAM
cucagccaccugcacaaggu

SEQ ID NO: 36111 - RNA, 20 nt, Artificial Sequence
  spacer sequence TTCN PAM
aauauccacagccccccaau

SEQ ID NO: 36112 - RNA, 20 nt, Artificial Sequence
  spacer sequence TTCN PAM
cguuuuccaauauccacagc

SEQ ID NO: 36113 - RNA, 20 nt, Artificial Sequence
  spacer sequence TTCN PAM
guuuuuucauguguauucuu

SEQ ID NO: 36114 - RNA, 20 nt, Artificial Sequence
  spacer sequence TTCN PAM
uguguauucuuuucuuucuu

SEQ ID NO: 36115 - RNA, 20 nt, Artificial Sequence
  spacer sequence TTCN PAM
uuucuuucuuucuuuuuuuu

SEQ ID NO: 36116 - RNA, 20 nt, Artificial Sequence
  spacer sequence TTCN PAM
uucuuucuuuuuuuuuuuuu

SEQ ID NO: 36117 - RNA, 20 nt, Artificial Sequence
  spacer sequence TTCN PAM
uucuuuuuuuuuuuuugaga

SEQ ID NO: 36118 - RNA, 20 nt, Artificial Sequence
  spacer sequence TTCN PAM
uuuuuuuuuuuugagacaga

SEQ ID NO: 36119 - RNA, 20 nt, Artificial Sequence
  spacer sequence TTCN PAM
uucuugucgcccaggcugga

SEQ ID NO: 36120 - RNA, 20 nt, Artificial Sequence
  spacer sequence TTCN PAM
ugucgcccaggcuggagcgc

SEQ ID NO: 36121 - RNA, 20 nt, Artificial Sequence
  spacer sequence TTCN PAM
agcgauucuccugccucagc

SEQ ID NO: 36122 - RNA, 20 nt, Artificial Sequence
  spacer sequence TTCN PAM
ccugccucagccucccgagu

SEQ ID NO: 36123 - RNA, 20 nt, Artificial Sequence
  spacer sequence TTCN PAM
ccauguuggucaggcugguc

SEQ ID NO: 36124 - RNA, 20 nt, Artificial Sequence
  spacer sequence TTCN PAM
agaccagccugaccaacaug

SEQ ID NO: 36125 - RNA, 20 nt, Artificial Sequence
  spacer sequence TTCN PAM
uguguauguuuuaaauuggu

SEQ ID NO: 36126 - RNA, 20 nt, Artificial Sequence
  spacer sequence TTCN PAM
aaaugucucauguagaaucu

SEQ ID NO: 36127 - RNA, 20 nt, Artificial Sequence
  spacer sequence TTCN PAM
acaugagacauuuugaaacc

SEQ ID NO: 36128 - RNA, 20 nt, Artificial Sequence
  spacer sequence TTCN PAM
cacccuccccagcuccuggc

SEQ ID NO: 36129 - RNA, 20 nt, Artificial Sequence
  spacer sequence TTCN PAM
aaugucagguuuucauugaa

SEQ ID NO: 36130 - RNA, 20 nt, Artificial Sequence
  spacer sequence TTCN PAM
uugaaauaccuuuucauugu

SEQ ID NO: 36131 - RNA, 20 nt, Artificial Sequence
  spacer sequence TTCN PAM
augaaaaccugacauuggaa

SEQ ID NO: 36132 - RNA, 20 nt, Artificial Sequence
  spacer sequence TTCN PAM
uugugagcuuuuaacuccgg

SEQ ID NO: 36133 - RNA, 20 nt, Artificial Sequence
  spacer sequence TTCN PAM
ucccuucuugacccuccuac

SEQ ID NO: 36134 - RNA, 20 nt, Artificial Sequence
  spacer sequence TTCN PAM
ugacccuccuacccgccccc

SEQ ID NO: 36135 - RNA, 20 nt, Artificial Sequence
  spacer sequence TTCN PAM
gggcagccguguggggagcu

SEQ ID NO: 36136 - RNA, 20 nt, Artificial Sequence
  spacer sequence TTCN PAM
uucuucacuugcuggccgcu

SEQ ID NO: 36137 - RNA, 20 nt, Artificial Sequence
  spacer sequence TTCN PAM
ucacuugcuggccgcugucu

SEQ ID NO: 36138 - RNA, 20 nt, Artificial Sequence
  spacer sequence TTCN PAM
cuugcuggccgcugucucag

SEQ ID NO: 36139 - RNA, 20 nt, Artificial Sequence
  spacer sequence TTCN PAM
ccagguguuccaggagcuug

SEQ ID NO: 36140 - RNA, 20 nt, Artificial Sequence
  spacer sequence TTCN PAM
aggagcuuggggagggcugg

SEQ ID NO: 36141 - RNA, 20 nt, Artificial Sequence
  spacer sequence TTCN PAM
uccaggcucuccuugaaccu

SEQ ID NO: 36142 - RNA, 20 nt, Artificial Sequence
  spacer sequence TTCN PAM
aggcucuccuugaaccuggc

SEQ ID NO: 36143 - RNA, 20 nt, Artificial Sequence
  spacer sequence TTCN PAM
aggagagccuggaagaacag

SEQ ID NO: 36144 - RNA, 20 nt, Artificial Sequence
  spacer sequence TTCN PAM
uggaacagugugcccccaaa

SEQ ID NO: 36145 - RNA, 20 nt, Artificial Sequence
  spacer sequence TTCN PAM
aggaaagcaugcuguguacc

SEQ ID NO: 36146 - RNA, 20 nt, Artificial Sequence
  spacer sequence TTCN PAM
caucuagggagccucaaaua

SEQ ID NO: 36147 - RNA, 20 nt, Artificial Sequence
  spacer sequence TTCN PAM
uccugcaaugaccguauuug

SEQ ID NO: 36148 - RNA, 20 nt, Artificial Sequence
  spacer sequence TTCN PAM
uccucucaccaggacgcugg

SEQ ID NO: 36149 - RNA, 20 nt, Artificial Sequence
  spacer sequence TTCN PAM
ggagucuccagagccaugag

SEQ ID NO: 36150 - RNA, 20 nt, Artificial Sequence
  spacer sequence TTCN PAM
cucauggcucuggagacucc

SEQ ID NO: 36151 - RNA, 20 nt, Artificial Sequence
  spacer sequence TTCN PAM
uucccucauggcucuggaga

SEQ ID NO: 36152 - RNA, 20 nt, Artificial Sequence
  spacer sequence TTCN PAM
cauccuguggccgccaagga

SEQ ID NO: 36153 - RNA, 20 nt, Artificial Sequence
  spacer sequence TTCN PAM
cauccaguggcaggucccac

SEQ ID NO: 36154 - RNA, 20 nt, Artificial Sequence
  spacer sequence TTCN PAM
cugacuuggugacugcacuc

SEQ ID NO: 36155 - RNA, 20 nt, Artificial Sequence
  spacer sequence TTCN PAM
gcugcgaugugagucugggg

SEQ ID NO: 36156 - RNA, 20 nt, Artificial Sequence
  spacer sequence TTCN PAM
ugggucagacaugcuccgug

SEQ ID NO: 36157 - RNA, 20 nt, Artificial Sequence
  spacer sequence TTCN PAM
gugaggcccagacauuggga

SEQ ID NO: 36158 - RNA, 20 nt, Artificial Sequence
  spacer sequence TTCN PAM
caaugucugggccucacuga

SEQ ID NO: 36159 - RNA, 20 nt, Artificial Sequence
  spacer sequence TTCN PAM
cccaccuccgcagcagccaa

SEQ ID NO: 36160 - RNA, 20 nt, Artificial Sequence
  spacer sequence TTCN PAM
caucagaaacucggauuuua

SEQ ID NO: 36161 - RNA, 20 nt, Artificial Sequence
  spacer sequence TTCN PAM
gaugagaaacauccggaguc

SEQ ID NO: 36162 - RNA, 20 nt, Artificial Sequence
  spacer sequence TTCN PAM
uguagacacagaaaagugau

SEQ ID NO: 36163 - RNA, 20 nt, Artificial Sequence
  spacer sequence TTCN PAM
gugucuacaugaaagugugg

SEQ ID NO: 36164 - RNA, 20 nt, Artificial Sequence
  spacer sequence TTCN PAM
gaauuuuagggaguuuuuuu

SEQ ID NO: 36165 - RNA, 20 nt, Artificial Sequence
  spacer sequence TTCN PAM
gaaccaucacuuuucugugu

SEQ ID NO: 36166 - RNA, 20 nt, Artificial Sequence
  spacer sequence TTCN PAM
agcauuucuccuaccucagc

SEQ ID NO: 36167 - RNA, 20 nt, Artificial Sequence
  spacer sequence TTCN PAM
ccuaccucagccucccaagu

SEQ ID NO: 36168 - RNA, 20 nt, Artificial Sequence
  spacer sequence TTCN PAM
agcuacuugggaggcugagg

SEQ ID NO: 36169 - RNA, 20 nt, Artificial Sequence
  spacer sequence TTCN PAM
ccguguuggucaggcugguc

SEQ ID NO: 36170 - RNA, 20 nt, Artificial Sequence
  spacer sequence TTCN PAM
gccucccacagugcugggau

SEQ ID NO: 36171 - RNA, 20 nt, Artificial Sequence
  spacer sequence TTCN PAM
agggaaggauucucaaggcu

SEQ ID NO: 36172 - RNA, 20 nt, Artificial Sequence
  spacer sequence TTCN PAM
cuugaaaagcagcacgauuu

SEQ ID NO: 36173 - RNA, 20 nt, Artificial Sequence
  spacer sequence TTCN PAM
caaggcuguaggagguuuag

SEQ ID NO: 36174 - RNA, 20 nt, Artificial Sequence
  spacer sequence TTCN PAM
aaaccuccuacagccuugag

SEQ ID NO: 36175 - RNA, 20 nt, Artificial Sequence
  spacer sequence TTCN PAM
cggcagacacucucgcucac

SEQ ID NO: 36176 - RNA, 20 nt, Artificial Sequence
  spacer sequence TTCN PAM
guggaaaacaauccgaauuc

SEQ ID NO: 36177 - RNA, 20 nt, Artificial Sequence
  spacer sequence TTCN PAM
acggaaguggggcccguaug

SEQ ID NO: 36178 - RNA, 20 nt, Artificial Sequence
  spacer sequence TTCN PAM
gauuguuuuccacggaagug

SEQ ID NO: 36179 - RNA, 20 nt, Artificial Sequence
  spacer sequence TTCN PAM
cuguguaucacgggcagaag

SEQ ID NO: 36180 - RNA, 20 nt, Artificial Sequence
  spacer sequence TTCN PAM
gcccgugauacacagggaau

SEQ ID NO: 36181 - RNA, 20 nt, Artificial Sequence
  spacer sequence TTCN PAM
gccuucugcccgugauacac

SEQ ID NO: 36182 - RNA, 20 nt, Artificial Sequence
  spacer sequence TTCN PAM
uucagccuucugcccgugau

SEQ ID NO: 36183 - RNA, 20 nt, Artificial Sequence
  spacer sequence TTCN PAM
cucuccgcacgguggcucga

SEQ ID NO: 36184 - RNA, 20 nt, Artificial Sequence
  spacer sequence TTCN PAM
accgcguuaccgcgacaccg

SEQ ID NO: 36185 - RNA, 20 nt, Artificial Sequence
  spacer sequence TTCN PAM
augucugucccgaugcuggg

SEQ ID NO: 36186 - RNA, 20 nt, Artificial Sequence
  spacer sequence TTCN PAM
cggugaggucuggugucacu

SEQ ID NO: 36187 - RNA, 20 nt, Artificial Sequence
  spacer sequence TTCN PAM
cuugguaugagggcaaauuu

SEQ ID NO: 36188 - RNA, 20 nt, Artificial Sequence
  spacer sequence TTCN PAM
gaaaauccuuuccagggugg

SEQ ID NO: 36189 - RNA, 20 nt, Artificial Sequence
  spacer sequence TTCN PAM
gaaccaaaauuugcccucau

SEQ ID NO: 36190 - RNA, 20 nt, Artificial Sequence
  spacer sequence TTCN PAM
aggguggcuuuggccaggau

SEQ ID NO: 36191 - RNA, 20 nt, Artificial Sequence
  spacer sequence TTCN PAM
ggauuugggauugcgguggg

SEQ ID NO: 36192 - RNA, 20 nt, Artificial Sequence
  spacer sequence TTCN PAM
agauuugggauugcugggcu

SEQ ID NO: 36193 - RNA, 20 nt, Artificial Sequence
  spacer sequence TTCN PAM
aaacuaucccagugcgagcc

SEQ ID NO: 36194 - RNA, 20 nt, Artificial Sequence
  spacer sequence TTCN PAM
caggagaaagugaaauaucc

SEQ ID NO: 36195 - RNA, 20 nt, Artificial Sequence
  spacer sequence TTCN PAM
ccugggaagauacagacccc

SEQ ID NO: 36196 - RNA, 20 nt, Artificial Sequence
  spacer sequence TTCN PAM
cuuucuccugggaagauaca

SEQ ID NO: 36197 - RNA, 20 nt, Artificial Sequence
  spacer sequence TTCN PAM
uggaucagacgacauuguca

SEQ ID NO: 36198 - RNA, 20 nt, Artificial Sequence
  spacer sequence TTCN PAM
auuuuuaaggaccuucuugg

SEQ ID NO: 36199 - RNA, 20 nt, Artificial Sequence
  spacer sequence TTCN PAM
gggagcauuaaccaaaggcc

SEQ ID NO: 36200 - RNA, 20 nt, Artificial Sequence
  spacer sequence TTCN PAM
ccaggggcugggccagggcu

SEQ ID NO: 36201 - RNA, 20 nt, Artificial Sequence
  spacer sequence TTCN PAM
gcccuggcccagccccugga

SEQ ID NO: 36202 - RNA, 20 nt, Artificial Sequence
  spacer sequence TTCN PAM
ugagccccuguguauacaag

SEQ ID NO: 36203 - RNA, 20 nt, Artificial Sequence
  spacer sequence TTCN PAM
ucucgucuuucuugagcccc

SEQ ID NO: 36204 - RNA, 20 nt, Artificial Sequence
  spacer sequence TTCN PAM
gugauuuccucucgucuuuc

SEQ ID NO: 36205 - RNA, 20 nt, Artificial Sequence
  spacer sequence TTCN PAM
gcaggggcugguguccccaa

SEQ ID NO: 36206 - RNA, 20 nt, Artificial Sequence
  spacer sequence TTCN PAM
uggcuucggcaggggcuggu

SEQ ID NO: 36207 - RNA, 20 nt, Artificial Sequence
  spacer sequence TTCN PAM
ugcugugucgggaaagggau

SEQ ID NO: 36208 - RNA, 20 nt, Artificial Sequence
  spacer sequence TTCN PAM
cgacacagcacgaagacacc

SEQ ID NO: 36209 - RNA, 20 nt, Artificial Sequence
  spacer sequence TTCN PAM
cggcaccaacgucccgucca

SEQ ID NO: 36210 - RNA, 20 nt, Artificial Sequence
  spacer sequence TTCN PAM
agaugggcaaaaacauccca

SEQ ID NO: 36211 - RNA, 20 nt, Artificial Sequence
  spacer sequence TTCN PAM
cuggacagugagaagccacg

SEQ ID NO: 36212 - RNA, 20 nt, Artificial Sequence
  spacer sequence TTCN PAM
cacuguccagagaagacccc

SEQ ID NO: 36213 - RNA, 20 nt, Artificial Sequence
  spacer sequence TTCN PAM
auucgcgucacaaagcccug

SEQ ID NO: 36214 - RNA, 20 nt, Artificial Sequence
  spacer sequence TTCN PAM
cgucacaaagcccugccucu

SEQ ID NO: 36215 - RNA, 20 nt, Artificial Sequence
  spacer sequence TTCN PAM
ucccucccccacagaccccg

SEQ ID NO: 36216 - RNA, 20 nt, Artificial Sequence
  spacer sequence TTCN PAM
gugcaccccagaaugugggc

SEQ ID NO: 36217 - RNA, 20 nt, Artificial Sequence
  spacer sequence TTCN PAM
ggggugcacagaacgggguc

SEQ ID NO: 36218 - RNA, 20 nt, Artificial Sequence
  spacer sequence TTCN PAM
ucaccgugagagcuuccggg

SEQ ID NO: 36219 - RNA, 20 nt, Artificial Sequence
  spacer sequence TTCN PAM
ccgugagagcuuccgggaag

SEQ ID NO: 36220 - RNA, 20 nt, Artificial Sequence
  spacer sequence TTCN PAM
gggaagcagaggagagcggg

SEQ ID NO: 36221 - RNA, 20 nt, Artificial Sequence
  spacer sequence TTCN PAM
cggaagcucucacggugaag

SEQ ID NO: 36222 - RNA, 20 nt, Artificial Sequence
  spacer sequence TTCN PAM
uuccuccuugucccucuccg

SEQ ID NO: 36223 - RNA, 20 nt, Artificial Sequence
  spacer sequence TTCN PAM
uccuugucccucuccgagcg

SEQ ID NO: 36224 - RNA, 20 nt, Artificial Sequence
  spacer sequence TTCN PAM
cauguggcuucgugcuguga

SEQ ID NO: 36225 - RNA, 20 nt, Artificial Sequence
  spacer sequence TTCN PAM
ugcugugagccacaaacggc

SEQ ID NO: 36226 - RNA, 20 nt, Artificial Sequence
  spacer sequence TTCN PAM
gggacagguuccccgugcgg

SEQ ID NO: 36227 - RNA, 20 nt, Artificial Sequence
  spacer sequence TTCN PAM
ccgugcggcgaggggcacgg

SEQ ID NO: 36228 - RNA, 20 nt, Artificial Sequence
  spacer sequence TTCN PAM
caucuggcucucggcccacc

SEQ ID NO: 36229 - RNA, 20 nt, Artificial Sequence
  spacer sequence TTCN PAM
uugcaggaucccuggggaau

SEQ ID NO: 36230 - RNA, 20 nt, Artificial Sequence
  spacer sequence TTCN PAM
ccagggauccugcaaggaag

SEQ ID NO: 36231 - RNA, 20 nt, Artificial Sequence
  spacer sequence TTCN PAM
aaauuucagucacacucucu

SEQ ID NO: 36232 - RNA, 20 nt, Artificial Sequence
  spacer sequence TTCN PAM
gucacacucucuaaauuuuc

SEQ ID NO: 36233 - RNA, 20 nt, Artificial Sequence
  spacer sequence TTCN PAM
uuaagagccuucacccagag

SEQ ID NO: 36234 - RNA, 20 nt, Artificial Sequence
  spacer sequence TTCN PAM
cccagagaaaaugauggauu

SEQ ID NO: 36235 - RNA, 20 nt, Artificial Sequence
  spacer sequence TTCN PAM
cugggugaaggcucuuaaug

SEQ ID NO: 36236 - RNA, 20 nt, Artificial Sequence
  spacer sequence TTCN PAM
cagcccccaccccuccguuc

SEQ ID NO: 36237 - RNA, 20 nt, Artificial Sequence
  spacer sequence TTCN PAM
uuccuaaaaccuguacuuuu

SEQ ID NO: 36238 - RNA, 20 nt, Artificial Sequence
  spacer sequence TTCN PAM
uaaaaccuguacuuuucucc

SEQ ID NO: 36239 - RNA, 20 nt, Artificial Sequence
  spacer sequence TTCN PAM
cccucgguucccaucaaacc

SEQ ID NO: 36240 - RNA, 20 nt, Artificial Sequence
  spacer sequence TTCN PAM
caucaaaccgggauuugaga

SEQ ID NO: 36241 - RNA, 20 nt, Artificial Sequence
  spacer sequence TTCN PAM
caaaucccgguuugauggga

SEQ ID NO: 36242 - RNA, 20 nt, Artificial Sequence
  spacer sequence TTCN PAM
uuugagccucugcuuuuauu

SEQ ID NO: 36243 - RNA, 20 nt, Artificial Sequence
  spacer sequence TTCN PAM
gugugauuucgccgucauuc

SEQ ID NO: 36244 - RNA, 20 nt, Artificial Sequence
  spacer sequence TTCN PAM
ccgucauuccacuuuuuaaa

SEQ ID NO: 36245 - RNA, 20 nt, Artificial Sequence
  spacer sequence TTCN PAM
acuuuuuaaaguccgggaug

SEQ ID NO: 36246 - RNA, 20 nt, Artificial Sequence
  spacer sequence TTCN PAM
gugucgagcgcuguggguuu

SEQ ID NO: 36247 - RNA, 20 nt, Artificial Sequence
  spacer sequence TTCN PAM
ggaaagcgugucagaauuuu

SEQ ID NO: 36248 - RNA, 20 nt, Artificial Sequence
  spacer sequence TTCN PAM
ugaaggggacaaagagacca

SEQ ID NO: 36249 - RNA, 20 nt, Artificial Sequence
  spacer sequence TTCN PAM
gacacgcuuuccugaagggg

SEQ ID NO: 36250 - RNA, 20 nt, Artificial Sequence
  spacer sequence TTCN PAM
ucauccgccucuccuucucc

SEQ ID NO: 36251 - RNA, 20 nt, Artificial Sequence
  spacer sequence TTCN PAM
cccucccaaguucucuuucu

SEQ ID NO: 36252 - RNA, 20 nt, Artificial Sequence
  spacer sequence TTCN PAM
cuuucucuuugaugugcuaa

SEQ ID NO: 36253 - RNA, 20 nt, Artificial Sequence
  spacer sequence TTCN PAM
cuuugaugugcuaacgugcu

SEQ ID NO: 36254 - RNA, 20 nt, Artificial Sequence
  spacer sequence TTCN PAM
gccaccgaaauacaacucag

SEQ ID NO: 36255 - RNA, 20 nt, Artificial Sequence
  spacer sequence TTCN PAM
guggccgaaggagcacguua

SEQ ID NO: 36256 - RNA, 20 nt, Artificial Sequence
  spacer sequence TTCN PAM
gugggcugcgugugcugugg

SEQ ID NO: 36257 - RNA, 20 nt, Artificial Sequence
  spacer sequence TTCN PAM
ccauccacaggcacaguggc

SEQ ID NO: 36258 - RNA, 20 nt, Artificial Sequence
  spacer sequence TTCN PAM
ccacguuggccaggguggcc

SEQ ID NO: 36259 - RNA, 20 nt, Artificial Sequence
  spacer sequence TTCN PAM
ccugccucagccucccaagc

SEQ ID NO: 36260 - RNA, 20 nt, Artificial Sequence
  spacer sequence TTCN PAM
cggguuaagcaauucuccug

SEQ ID NO: 36261 - RNA, 20 nt, Artificial Sequence
  spacer sequence TTCN PAM
uuuugugagacggagucucg

SEQ ID NO: 36262 - RNA, 20 nt, Artificial Sequence
  spacer sequence TTCN PAM
ccgacccucuuauucuuuuu

SEQ ID NO: 36263 - RNA, 20 nt, Artificial Sequence
  spacer sequence TTCN PAM
cgccauucuccugccucagc

SEQ ID NO: 36264 - RNA, 20 nt, Artificial Sequence
  spacer sequence TTCN PAM
ccugccucagccucccgagu

SEQ ID NO: 36265 - RNA, 20 nt, Artificial Sequence
  spacer sequence TTCN PAM
ccguguuagccaggaugguc

SEQ ID NO: 36266 - RNA, 20 nt, Artificial Sequence
  spacer sequence TTCN PAM
ggccgggcgcgguggcucac

SEQ ID NO: 36267 - RNA, 20 nt, Artificial Sequence
  spacer sequence TTCN PAM
agacucaccaggccgaggag

SEQ ID NO: 36268 - RNA, 20 nt, Artificial Sequence
  spacer sequence TTCN PAM
cugaggagcggcugugccuu

SEQ ID NO: 36269 - RNA, 20 nt, Artificial Sequence
  spacer sequence TTCN PAM
gggagcggagggugcgcaca

SEQ ID NO: 36270 - RNA, 20 nt, Artificial Sequence
  spacer sequence TTCN PAM
caccuggccugagagccaca

SEQ ID NO: 36271 - RNA, 20 nt, Artificial Sequence
  spacer sequence TTCN PAM
ccccaccugccuuccgggug

SEQ ID NO: 36272 - RNA, 20 nt, Artificial Sequence
  spacer sequence TTCN PAM
gggugacuuccugaggucgc

SEQ ID NO: 36273 - RNA, 20 nt, Artificial Sequence
  spacer sequence TTCN PAM
ugaggucgcuuccaggccuc

SEQ ID NO: 36274 - RNA, 20 nt, Artificial Sequence
  spacer sequence TTCN PAM
aggccucagaccuggugcuc

SEQ ID NO: 36275 - RNA, 20 nt, Artificial Sequence
  spacer sequence TTCN PAM
aggccucagaccuggcuucg

SEQ ID NO: 36276 - RNA, 20 nt, Artificial Sequence
  spacer sequence TTCN PAM
cgucuguuuucugaagcacc

SEQ ID NO: 36277 - RNA, 20 nt, Artificial Sequence
  spacer sequence TTCN PAM
gaagcaccucugcuccgcuc

SEQ ID NO: 36278 - RNA, 20 nt, Artificial Sequence
  spacer sequence TTCN PAM
gaaaacagacgcgaagccag

SEQ ID NO: 36279 - RNA, 20 nt, Artificial Sequence
  spacer sequence TTCN PAM
ccgccugauucuugggcggc

SEQ ID NO: 36280 - RNA, 20 nt, Artificial Sequence
  spacer sequence TTCN PAM
ugggcggccccuugcaggcu

SEQ ID NO: 36281 - RNA, 20 nt, Artificial Sequence
  spacer sequence TTCN PAM
gugcagguuggucucccagu

SEQ ID NO: 36282 - RNA, 20 nt, Artificial Sequence
  spacer sequence TTCN PAM
gguggaaccccugcccuugg

SEQ ID NO: 36283 - RNA, 20 nt, Artificial Sequence
  spacer sequence TTCN PAM
accagaaccagcucugcaac

SEQ ID NO: 36284 - RNA, 20 nt, Artificial Sequence
  spacer sequence TTCN PAM
cggaccugcuugucacuacg

SEQ ID NO: 36285 - RNA, 20 nt, Artificial Sequence
  spacer sequence TTCN PAM
gggagggucccuguugcaca

SEQ ID NO: 36286 - RNA, 20 nt, Artificial Sequence
  spacer sequence TTCN PAM
uuguuugugcaacagggacc

SEQ ID NO: 36287 - RNA, 20 nt, Artificial Sequence
  spacer sequence TTCN PAM
guccugugucucgguuuccu

SEQ ID NO: 36288 - RNA, 20 nt, Artificial Sequence
  spacer sequence TTCN PAM
guggcccguuuuccguccug

SEQ ID NO: 36289 - RNA, 20 nt, Artificial Sequence
  spacer sequence TTCN PAM
ucacaacccaggcagcagag

SEQ ID NO: 36290 - RNA, 20 nt, Artificial Sequence
  spacer sequence TTCN PAM
cgaggccuucaucacaaccc

SEQ ID NO: 36291 - RNA, 20 nt, Artificial Sequence
  spacer sequence TTCN PAM
acagcuacccugagaccucc

SEQ ID NO: 36292 - RNA, 20 nt, Artificial Sequence
  spacer sequence TTCN PAM
ugugccuggcagcgaguguc

SEQ ID NO: 36293 - RNA, 20 nt, Artificial Sequence
  spacer sequence TTCN PAM
cucuuugccccacugugucc

SEQ ID NO: 36294 - RNA, 20 nt, Artificial Sequence
  spacer sequence TTCN PAM
cccaggacacaguggggcaa

SEQ ID NO: 36295 - RNA, 20 nt, Artificial Sequence
  spacer sequence TTCN PAM
uggagcacauucucccagga

SEQ ID NO: 36296 - RNA, 20 nt, Artificial Sequence
  spacer sequence TTCN PAM
agguccugucugcugcaagg

SEQ ID NO: 36297 - RNA, 20 nt, Artificial Sequence
  spacer sequence TTCN PAM
ccgggccugggacagacacc

SEQ ID NO: 36298 - RNA, 20 nt, Artificial Sequence
  spacer sequence TTCN PAM
ccuggcuaggacugggccag

SEQ ID NO: 36299 - RNA, 20 nt, Artificial Sequence
  spacer sequence TTCN PAM
uuuccccuggcuaggacugg

SEQ ID NO: 36300 - RNA, 20 nt, Artificial Sequence
  spacer sequence TTCN PAM
ggaugcgugagugacucguc

SEQ ID NO: 36301 - RNA, 20 nt, Artificial Sequence
  spacer sequence TTCN PAM
agccucuggcaggauuucgg

SEQ ID NO: 36302 - RNA, 20 nt, Artificial Sequence
  spacer sequence TTCN PAM
gguccccagugcccugggcg

SEQ ID NO: 36303 - RNA, 20 nt, Artificial Sequence
  spacer sequence TTCN PAM
aaagcagacaccugccuaca

SEQ ID NO: 36304 - RNA, 20 nt, Artificial Sequence
  spacer sequence TTCN PAM
aacacugagacuugugcgau

SEQ ID NO: 36305 - RNA, 20 nt, Artificial Sequence
  spacer sequence TTCN PAM
ucgcacaagucucaguguuu

SEQ ID NO: 36306 - RNA, 20 nt, Artificial Sequence
  spacer sequence TTCN PAM
ggccugagguuggaggcagg

SEQ ID NO: 36307 - RNA, 20 nt, Artificial Sequence
  spacer sequence TTCN PAM
cacccaaagcggcucccgug

SEQ ID NO: 36308 - RNA, 20 nt, Artificial Sequence
  spacer sequence TTCN PAM
ccacucuagcucacagagcc

SEQ ID NO: 36309 - RNA, 20 nt, Artificial Sequence
  spacer sequence TTCN PAM
cauugucggccgcccagagg

SEQ ID NO: 36310 - RNA, 20 nt, Artificial Sequence
  spacer sequence TTCN PAM
cagagggcauggggcugcca

SEQ ID NO: 36311 - RNA, 20 nt, Artificial Sequence
  spacer sequence TTCN PAM
uacccagccacggguggcag

SEQ ID NO: 36312 - RNA, 20 nt, Artificial Sequence
  spacer sequence TTCN PAM
gucuuccuccugcaucagcc

SEQ ID NO: 36313 - RNA, 20 nt, Artificial Sequence
  spacer sequence TTCN PAM
uccugcaucagccgacagcc

SEQ ID NO: 36314 - RNA, 20 nt, Artificial Sequence
  spacer sequence TTCN PAM
caggagcucugaguccgccu

SEQ ID NO: 36315 - RNA, 20 nt, Artificial Sequence
  spacer sequence TTCN PAM
ccccguccucaccccagcgg

SEQ ID NO: 36316 - RNA, 20 nt, Artificial Sequence
  spacer sequence TTCN PAM
ugugucuugugucccuucac

SEQ ID NO: 36317 - RNA, 20 nt, Artificial Sequence
  spacer sequence TTCN PAM
ccacuaccagcccggcacgu

SEQ ID NO: 36318 - RNA, 20 nt, Artificial Sequence
  spacer sequence TTCN PAM
cacuccgacacugaccugag

SEQ ID NO: 36319 - RNA, 20 nt, Artificial Sequence
  spacer sequence TTCN PAM
caggugcgugcccgggugug

SEQ ID NO: 36320 - RNA, 20 nt, Artificial Sequence
  spacer sequence TTCN PAM
cagccaacaggauccaggcc

SEQ ID NO: 36321 - RNA, 20 nt, Artificial Sequence
  spacer sequence TTCN PAM
ucccagccaacaggauccag

SEQ ID NO: 36322 - RNA, 20 nt, Artificial Sequence
  spacer sequence TTCN PAM
aggggccccgggccucuggc

SEQ ID NO: 36323 - RNA, 20 nt, Artificial Sequence
  spacer sequence TTCN PAM
guguggggugaugugggagg

SEQ ID NO: 36324 - RNA, 20 nt, Artificial Sequence
  spacer sequence TTCN PAM
ccaaccucccacaucacccc

SEQ ID NO: 36325 - RNA, 20 nt, Artificial Sequence
  spacer sequence TTCN PAM
auuccccaaccucccacauc

SEQ ID NO: 36326 - RNA, 20 nt, Artificial Sequence
  spacer sequence TTCN PAM
cccuccccccaucauuagga

SEQ ID NO: 36327 - RNA, 20 nt, Artificial Sequence
  spacer sequence TTCN PAM
uaaugauggggggagggaga

SEQ ID NO: 36328 - RNA, 20 nt, Artificial Sequence
  spacer sequence TTCN PAM
uuccuaaugauggggggagg

SEQ ID NO: 36329 - RNA, 20 nt, Artificial Sequence
  spacer sequence TTCN PAM
auggggccaaguuuauuuua

SEQ ID NO: 36330 - RNA, 20 nt, Artificial Sequence
  spacer sequence TTCN PAM
cgcaauucuccugccucagc

SEQ ID NO: 36331 - RNA, 20 nt, Artificial Sequence
  spacer sequence TTCN PAM
ccugccucagccucccgagu

SEQ ID NO: 36332 - RNA, 20 nt, Artificial Sequence
  spacer sequence TTCN PAM
agaccaaccuggccaacaug

SEQ ID NO: 36333 - RNA, 20 nt, Artificial Sequence
  spacer sequence TTCN PAM
gccucccacagcacugggau

SEQ ID NO: 36334 - RNA, 20 nt, Artificial Sequence
  spacer sequence TTCN PAM
gcacauugcagugucaggcg

SEQ ID NO: 36335 - RNA, 20 nt, Artificial Sequence
  spacer sequence TTCN PAM
ggacuagagagaggugaggg

SEQ ID NO: 36336 - RNA, 20 nt, Artificial Sequence
  spacer sequence TTCN PAM
uuuuggggugaugaggacau

SEQ ID NO: 36337 - RNA, 20 nt, Artificial Sequence
  spacer sequence TTCN PAM
caagccugagagccuccacg

SEQ ID NO: 36338 - RNA, 20 nt, Artificial Sequence
  spacer sequence TTCN PAM
ggauguuucguagaaauggg

SEQ ID NO: 36339 - RNA, 20 nt, Artificial Sequence
  spacer sequence TTCN PAM
uagaaaugggaucagacacu

SEQ ID NO: 36340 - RNA, 20 nt, Artificial Sequence
  spacer sequence TTCN PAM
acgaaacauccagaacaggc

SEQ ID NO: 36341 - RNA, 20 nt, Artificial Sequence
  spacer sequence TTCN PAM
ucccgguguggugugugcug

SEQ ID NO: 36342 - RNA, 20 nt, Artificial Sequence
  spacer sequence TTCN PAM
uucuuguggcugaguggcgc

SEQ ID NO: 36343 - RNA, 20 nt, Artificial Sequence
  spacer sequence TTCN PAM
uguggcugaguggcgcucug

SEQ ID NO: 36344 - RNA, 20 nt, Artificial Sequence
  spacer sequence TTCN PAM
uggcucgucugugaguggac

SEQ ID NO: 36345 - RNA, 20 nt, Artificial Sequence
  spacer sequence TTCN PAM
cugcguuucccggccggcgu

SEQ ID NO: 36346 - RNA, 20 nt, Artificial Sequence
  spacer sequence TTCN PAM
cggccggcgucuccuucugu

SEQ ID NO: 36347 - RNA, 20 nt, Artificial Sequence
  spacer sequence TTCN PAM
gucaugaaaugcucagugcc

SEQ ID NO: 36348 - RNA, 20 nt, Artificial Sequence
  spacer sequence TTCN PAM
ugacagaaggagacgccggc

SEQ ID NO: 36349 - RNA, 20 nt, Artificial Sequence
  spacer sequence TTCN PAM
cggauaucugcuuucaaaac

SEQ ID NO: 36350 - RNA, 20 nt, Artificial Sequence
  spacer sequence TTCN PAM
aaacacccaggccggucuug

SEQ ID NO: 36351 - RNA, 20 nt, Artificial Sequence
  spacer sequence TTCN PAM
gagguaggugagacucuggg

SEQ ID NO: 36352 - RNA, 20 nt, Artificial Sequence
  spacer sequence TTCN PAM
cagagucucaccuaccucgg

SEQ ID NO: 36353 - RNA, 20 nt, Artificial Sequence
  spacer sequence TTCN PAM
cuucccagagucucaccuac

SEQ ID NO: 36354 - RNA, 20 nt, Artificial Sequence
  spacer sequence TTCN PAM
cuccuucccuucccagaguc

SEQ ID NO: 36355 - RNA, 20 nt, Artificial Sequence
  spacer sequence TTCN PAM
ccuccucccuguggucaagg

SEQ ID NO: 36356 - RNA, 20 nt, Artificial Sequence
  spacer sequence TTCN PAM
acaagccgggcugggcuccg

SEQ ID NO: 36357 - RNA, 20 nt, Artificial Sequence
  spacer sequence TTCN PAM
ugccucuuccagccccuggc

SEQ ID NO: 36358 - RNA, 20 nt, Artificial Sequence
  spacer sequence TTCN PAM
agccccuggcgcucagcuuu

SEQ ID NO: 36359 - RNA, 20 nt, Artificial Sequence
  spacer sequence TTCN PAM
gacuuuggauuuaggguccg

SEQ ID NO: 36360 - RNA, 20 nt, Artificial Sequence
  spacer sequence TTCN PAM
aggcaaggcagcuuuuugau

SEQ ID NO: 36361 - RNA, 20 nt, Artificial Sequence
  spacer sequence TTCN PAM
guccuacgaggaggcagcaa

SEQ ID NO: 36362 - RNA, 20 nt, Artificial Sequence
  spacer sequence TTCN PAM
cuugagcaggagacuccaca

SEQ ID NO: 36363 - RNA, 20 nt, Artificial Sequence
  spacer sequence TTCN PAM
gccgugggucacguggccuu

SEQ ID NO: 36364 - RNA, 20 nt, Artificial Sequence
  spacer sequence TTCN PAM
agcccagaggggucccuggg

SEQ ID NO: 36365 - RNA, 20 nt, Artificial Sequence
  spacer sequence TTCN PAM
ugcuuaucuaaaaacgccug

SEQ ID NO: 36366 - RNA, 20 nt, Artificial Sequence
  spacer sequence TTCN PAM
ucucaggagcuuccugcuua

SEQ ID NO: 36367 - RNA, 20 nt, Artificial Sequence
  spacer sequence TTCN PAM
ggccucugugguuuuuggag

SEQ ID NO: 36368 - RNA, 20 nt, Artificial Sequence
  spacer sequence TTCN PAM
auuuuaucuuuaaagaagau

SEQ ID NO: 36369 - RNA, 20 nt, Artificial Sequence
  spacer sequence TTCN PAM
uuaaagauaaaaucgaaaac

SEQ ID NO: 36370 - RNA, 20 nt, Artificial Sequence
  spacer sequence TTCN PAM
ugcaucuucuuuaaagauaa

SEQ ID NO: 36371 - RNA, 20 nt, Artificial Sequence
  spacer sequence TTCN PAM
ggagccugacccaugggcuu

SEQ ID NO: 36372 - RNA, 20 nt, Artificial Sequence
  spacer sequence TTCN PAM
ucuggagccugacccauggg

SEQ ID NO: 36373 - RNA, 20 nt, Artificial Sequence
  spacer sequence TTCN PAM
ucccggauauuucuucugga

SEQ ID NO: 36374 - RNA, 20 nt, Artificial Sequence
  spacer sequence TTCN PAM
gggacacaggcugggguuuu

SEQ ID NO: 36375 - RNA, 20 nt, Artificial Sequence
  spacer sequence TTCN PAM
agggagggcucugcccacca

SEQ ID NO: 36376 - RNA, 20 nt, Artificial Sequence
  spacer sequence TTCN PAM
ugacccgugaugaugguggg

SEQ ID NO: 36377 - RNA, 20 nt, Artificial Sequence
  spacer sequence TTCN PAM
acuucuggcccagcgaggca

SEQ ID NO: 36378 - RNA, 20 nt, Artificial Sequence
  spacer sequence TTCN PAM
ggcccagcgaggcaccugga

SEQ ID NO: 36379 - RNA, 20 nt, Artificial Sequence
  spacer sequence TTCN PAM
acacagccacggggugcucc

SEQ ID NO: 36380 - RNA, 20 nt, Artificial Sequence
  spacer sequence TTCN PAM
cagcgggccccguccccacg

SEQ ID NO: 36381 - RNA, 20 nt, Artificial Sequence
  spacer sequence TTCN PAM
ccuuggacaagagcugccuc

SEQ ID NO: 36382 - RNA, 20 nt, Artificial Sequence
  spacer sequence TTCN PAM
ggaccaaggggcuggaggca

SEQ ID NO: 36383 - RNA, 20 nt, Artificial Sequence
  spacer sequence TTCN PAM
cucugggagacguuuacuuu

SEQ ID NO: 36384 - RNA, 20 nt, Artificial Sequence
  spacer sequence TTCN PAM
uggcaguuggccagcguggc

SEQ ID NO: 36385 - RNA, 20 nt, Artificial Sequence
  spacer sequence TTCN PAM
gugagugccacgcuggccaa

SEQ ID NO: 36386 - RNA, 20 nt, Artificial Sequence
  spacer sequence TTCN PAM
ugaggccacaccgcccugag

SEQ ID NO: 36387 - RNA, 20 nt, Artificial Sequence
  spacer sequence TTCN PAM
gcugagggcacgcacccugc

SEQ ID NO: 36388 - RNA, 20 nt, Artificial Sequence
  spacer sequence TTCN PAM
gagacccaucucuaaggcca

SEQ ID NO: 36389 - RNA, 20 nt, Artificial Sequence
  spacer sequence TTCN PAM
uaaaaauuuaacaaacgucc

SEQ ID NO: 36390 - RNA, 20 nt, Artificial Sequence
  spacer sequence TTCN PAM
guguugauuuugcuuuuuuu

SEQ ID NO: 36391 - RNA, 20 nt, Artificial Sequence
  spacer sequence TTCN PAM
uccauuuguuucuguguuga

SEQ ID NO: 36392 - RNA, 20 nt, Artificial Sequence
  spacer sequence TTCN PAM
cuggugagacacccacccug

SEQ ID NO: 36393 - RNA, 20 nt, Artificial Sequence
  spacer sequence TTCN PAM
ucucucuuuccuucucucuu

SEQ ID NO: 36394 - RNA, 20 nt, Artificial Sequence
  spacer sequence TTCN PAM
cucuuuccuucucucuucuu

SEQ ID NO: 36395 - RNA, 20 nt, Artificial Sequence
  spacer sequence TTCN PAM
uucucucuucuucuucccca

SEQ ID NO: 36396 - RNA, 20 nt, Artificial Sequence
  spacer sequence TTCN PAM
cucuucuucuuccccacguu

SEQ ID NO: 36397 - RNA, 20 nt, Artificial Sequence
  spacer sequence TTCN PAM
ucuuccccacguugcccuuc

SEQ ID NO: 36398 - RNA, 20 nt, Artificial Sequence
  spacer sequence TTCN PAM
uccccacguugcccuuccuu

SEQ ID NO: 36399 - RNA, 20 nt, Artificial Sequence
  spacer sequence TTCN PAM
ccacguugcccuuccuuuaa

SEQ ID NO: 36400 - RNA, 20 nt, Artificial Sequence
  spacer sequence TTCN PAM
uuuaaaauaguuacuuuuaa

SEQ ID NO: 36401 - RNA, 20 nt, Artificial Sequence
  spacer sequence TTCN PAM
auuuaaaaguuuccuuuguu

SEQ ID NO: 36402 - RNA, 20 nt, Artificial Sequence
  spacer sequence TTCN PAM
uuuguuucuuguuaucauuu

SEQ ID NO: 36403 - RNA, 20 nt, Artificial Sequence
  spacer sequence TTCN PAM
uguuaucauuuucuacguuu

SEQ ID NO: 36404 - RNA, 20 nt, Artificial Sequence
  spacer sequence TTCN PAM
acguuugucccuucguucag

SEQ ID NO: 36405 - RNA, 20 nt, Artificial Sequence
  spacer sequence TTCN PAM
uucagucuuauaaugacggu

SEQ ID NO: 36406 - RNA, 20 nt, Artificial Sequence
  spacer sequence TTCN PAM
gucuuauaaugacggucuca

SEQ ID NO: 36407 - RNA, 20 nt, Artificial Sequence
  spacer sequence TTCN PAM
caucgcagacgcucacacca

SEQ ID NO: 36408 - RNA, 20 nt, Artificial Sequence
  spacer sequence TTCN PAM
ccgcgaggcucccgaccucc

SEQ ID NO: 36409 - RNA, 20 nt, Artificial Sequence
  spacer sequence TTCN PAM
ccucuggucucugcuggagc

SEQ ID NO: 36410 - RNA, 20 nt, Artificial Sequence
  spacer sequence TTCN PAM
gcuucuccucuggucucugc

SEQ ID NO: 36411 - RNA, 20 nt, Artificial Sequence
  spacer sequence TTCN PAM
aggcugacaggaacugcacg

SEQ ID NO: 36412 - RNA, 20 nt, Artificial Sequence
  spacer sequence TTCN PAM
ugucagccuggaaugccucg

SEQ ID NO: 36413 - RNA, 20 nt, Artificial Sequence
  spacer sequence TTCN PAM
ccuacacaccaggcaggucc

SEQ ID NO: 36414 - RNA, 20 nt, Artificial Sequence
  spacer sequence TTCN PAM
ccuugcucacgcugcuccag

SEQ ID NO: 36415 - RNA, 20 nt, Artificial Sequence
  spacer sequence TTCN PAM
ucccggcuccucuucuccuu

SEQ ID NO: 36416 - RNA, 20 nt, Artificial Sequence
  spacer sequence TTCN PAM
cagcaugugacgcccucucc

SEQ ID NO: 36417 - RNA, 20 nt, Artificial Sequence
  spacer sequence TTCN PAM
ugucauccauccucaucauc

SEQ ID NO: 36418 - RNA, 20 nt, Artificial Sequence
  spacer sequence TTCN PAM
caucauccuccccuaucauc

SEQ ID NO: 36419 - RNA, 20 nt, Artificial Sequence
  spacer sequence TTCN PAM
ccaucauccuucccaucauc

SEQ ID NO: 36420 - RNA, 20 nt, Artificial Sequence
  spacer sequence TTCN PAM
ccaucauccuuaccaucauc

SEQ ID NO: 36421 - RNA, 20 nt, Artificial Sequence
  spacer sequence TTCN PAM
ccaucauccuucuccaucau

SEQ ID NO: 36422 - RNA, 20 nt, Artificial Sequence
  spacer sequence TTCN PAM
ccaucauccuuccccaucau

SEQ ID NO: 36423 - RNA, 20 nt, Artificial Sequence
  spacer sequence TTCN PAM
ccaucauccuuccccaucau

SEQ ID NO: 36424 - RNA, 20 nt, Artificial Sequence
  spacer sequence TTCN PAM
ccaucauccuuccccaucau

SEQ ID NO: 36425 - RNA, 20 nt, Artificial Sequence
  spacer sequence TTCN PAM
ccaucaucguucuccaucau

SEQ ID NO: 36426 - RNA, 20 nt, Artificial Sequence
  spacer sequence TTCN PAM
ccaucaucguucuccaucau

SEQ ID NO: 36427 - RNA, 20 nt, Artificial Sequence
  spacer sequence TTCN PAM
uucuccaucaucguucucca

SEQ ID NO: 36428 - RNA, 20 nt, Artificial Sequence
  spacer sequence TTCN PAM
cacauuccuucuccaucauc

SEQ ID NO: 36429 - RNA, 20 nt, Artificial Sequence
  spacer sequence TTCN PAM
ccaucaccuucccacauucc

SEQ ID NO: 36430 - RNA, 20 nt, Artificial Sequence
  spacer sequence TTCN PAM
caucauccuuccccaucacc

SEQ ID NO: 36431 - RNA, 20 nt, Artificial Sequence
  spacer sequence TTCN PAM
ccaucauccuucccaucauc

SEQ ID NO: 36432 - RNA, 20 nt, Artificial Sequence
  spacer sequence TTCN PAM
ccaucauccuuaccaucauc

SEQ ID NO: 36433 - RNA, 20 nt, Artificial Sequence
  spacer sequence TTCN PAM
ccaucauccuucuccaucau

SEQ ID NO: 36434 - RNA, 20 nt, Artificial Sequence
  spacer sequence TTCN PAM
ccaucauccuucuccaucau

SEQ ID NO: 36435 - RNA, 20 nt, Artificial Sequence
  spacer sequence TTCN PAM
ccaucaucguucuccaucau

SEQ ID NO: 36436 - RNA, 20 nt, Artificial Sequence
  spacer sequence TTCN PAM
ccaucaucguucuccaucau

SEQ ID NO: 36437 - RNA, 20 nt, Artificial Sequence
  spacer sequence TTCN PAM
uucuccaucaucguucucca

SEQ ID NO: 36438 - RNA, 20 nt, Artificial Sequence
  spacer sequence TTCN PAM
cacauuccuucuccaucauc

SEQ ID NO: 36439 - RNA, 20 nt, Artificial Sequence
  spacer sequence TTCN PAM
aaaguguugggaccacaggc

SEQ ID NO: 36440 - RNA, 20 nt, Artificial Sequence
  spacer sequence TTCN PAM
agaccagccuggccaacaug

SEQ ID NO: 36441 - RNA, 20 nt, Artificial Sequence
  spacer sequence TTCN PAM
ccauguuggccaggcugguc

SEQ ID NO: 36442 - RNA, 20 nt, Artificial Sequence
  spacer sequence TTCN PAM
gccuccaaagaaagaaguaa

SEQ ID NO: 36443 - RNA, 20 nt, Artificial Sequence
  spacer sequence TTCN PAM
uuggaggcagaaauugggca

SEQ ID NO: 36444 - RNA, 20 nt, Artificial Sequence
  spacer sequence TTCN PAM
uucuuuggaggcagaaauug

SEQ ID NO: 36445 - RNA, 20 nt, Artificial Sequence
  spacer sequence TTCN PAM
gccuuuuaguuuuuacuucu

SEQ ID NO: 36446 - RNA, 20 nt, Artificial Sequence
  spacer sequence TTCN PAM
uuucugccuuuuaguuuuua

SEQ ID NO: 36447 - RNA, 20 nt, Artificial Sequence
  spacer sequence TTCN PAM
agacauuguauggaaaagca

SEQ ID NO: 36448 - RNA, 20 nt, Artificial Sequence
  spacer sequence TTCN PAM
auacaaugucuggaaucuau

SEQ ID NO: 36449 - RNA, 20 nt, Artificial Sequence
  spacer sequence TTCN PAM
cagugcuuuuccauacaaug

SEQ ID NO: 36450 - RNA, 20 nt, Artificial Sequence
  spacer sequence TTCN PAM
guuccgaucugauugccggu

SEQ ID NO: 36451 - RNA, 20 nt, Artificial Sequence
  spacer sequence TTCN PAM
gaucugauugccggugcaug

SEQ ID NO: 36452 - RNA, 20 nt, Artificial Sequence
  spacer sequence TTCN PAM
aucgaucacgacccucucac

SEQ ID NO: 36453 - RNA, 20 nt, Artificial Sequence
  spacer sequence TTCN PAM
gggcucacaacucucagggg

SEQ ID NO: 36454 - RNA, 20 nt, Artificial Sequence
  spacer sequence TTCN PAM
ugucccucuucagggcucac

SEQ ID NO: 36455 - RNA, 20 nt, Artificial Sequence
  spacer sequence TTCN PAM
gccggggccaucggcaagac

SEQ ID NO: 36456 - RNA, 20 nt, Artificial Sequence
  spacer sequence TTCN PAM
uucucuaacugggugucuga

SEQ ID NO: 36457 - RNA, 20 nt, Artificial Sequence
  spacer sequence TTCN PAM
cuaacugggugucugaggag

SEQ ID NO: 36458 - RNA, 20 nt, Artificial Sequence
  spacer sequence TTCN PAM
ugcuacacuaucucuacuaa

SEQ ID NO: 36459 - RNA, 20 nt, Artificial Sequence
  spacer sequence TTCN PAM
gccaccaagcccggccuuuu

SEQ ID NO: 36460 - RNA, 20 nt, Artificial Sequence
  spacer sequence TTCN PAM
ccguguuagccaggaugguc

SEQ ID NO: 36461 - RNA, 20 nt, Artificial Sequence
  spacer sequence TTCN PAM
ccugccucagccucccgagu

SEQ ID NO: 36462 - RNA, 20 nt, Artificial Sequence
  spacer sequence TTCN PAM
cgccauucuccugccucagc

SEQ ID NO: 36463 - RNA, 20 nt, Artificial Sequence
  spacer sequence TTCN PAM
acacugauuuacuuguuauu

SEQ ID NO: 36464 - RNA, 20 nt, Artificial Sequence
  spacer sequence TTCN PAM
cgggucagggucaccgggag

SEQ ID NO: 36465 - RNA, 20 nt, Artificial Sequence
  spacer sequence TTCN PAM
ggcccgcuucgcgggucagg

SEQ ID NO: 36466 - RNA, 20 nt, Artificial Sequence
  spacer sequence TTCN PAM
ggaguaggggcugcggggcu

SEQ ID NO: 36467 - RNA, 20 nt, Artificial Sequence
  spacer sequence TTCN PAM
gggacgcggauucuggagua

SEQ ID NO: 36468 - RNA, 20 nt, Artificial Sequence
  spacer sequence TTCN PAM
ccggcgcugggcucgcugcg

SEQ ID NO: 36469 - RNA, 20 nt, Artificial Sequence
  spacer sequence TTCN PAM
cagucuccgcccggggacac

SEQ ID NO: 36470 - RNA, 20 nt, Artificial Sequence
  spacer sequence TTCN PAM
cccaaggagccugguguccc

SEQ ID NO: 36471 - RNA, 20 nt, Artificial Sequence
  spacer sequence TTCN PAM
agcgcgcuggucccgggagg

SEQ ID NO: 36472 - RNA, 20 nt, Artificial Sequence
  spacer sequence TTCN PAM
cacugcggggcgccccggcu

SEQ ID NO: 36473 - RNA, 20 nt, Artificial Sequence
  spacer sequence TTCN PAM
uggcgggcugaugcgggcuu

SEQ ID NO: 36474 - RNA, 20 nt, Artificial Sequence
  spacer sequence TTCN PAM
gcugcgggggccgcgcggga

SEQ ID NO: 36475 - RNA, 20 nt, Artificial Sequence
  spacer sequence TTCN PAM
gcgggugcagcucacuggcc

SEQ ID NO: 36476 - RNA, 20 nt, Artificial Sequence
  spacer sequence TTCN PAM
cgacccgcagggcgcagcug

SEQ ID NO: 36477 - RNA, 20 nt, Artificial Sequence
  spacer sequence TTCN PAM
cuccccggaccccccggacc

SEQ ID NO: 36478 - RNA, 20 nt, Artificial Sequence
  spacer sequence TTCN PAM
ggugcagcacacccgggcug

SEQ ID NO: 36479 - RNA, 20 nt, Artificial Sequence
  spacer sequence TTCN PAM
cagucgugacaaccacagau

SEQ ID NO: 36480 - RNA, 20 nt, Artificial Sequence
  spacer sequence TTCN PAM
cccccggccgcaaucccgcc

SEQ ID NO: 36481 - RNA, 20 nt, Artificial Sequence
  spacer sequence TTCN PAM
uaacggguugggaggguggu

SEQ ID NO: 36482 - RNA, 20 nt, Artificial Sequence
  spacer sequence TTCN PAM
ccacccaacccgcgcugagu

SEQ ID NO: 36483 - RNA, 20 nt, Artificial Sequence
  spacer sequence TTCN PAM
cgccugcaggccggcggccu

SEQ ID NO: 36484 - RNA, 20 nt, Artificial Sequence
  spacer sequence TTCN PAM
ggcagagccgcagccuccug

SEQ ID NO: 36485 - RNA, 20 nt, Artificial Sequence
  spacer sequence TTCN PAM
cccugggucgggguucaggc

SEQ ID NO: 36486 - RNA, 20 nt, Artificial Sequence
  spacer sequence TTCN PAM
ggggacgccgcucuggccuc

SEQ ID NO: 36487 - RNA, 20 nt, Artificial Sequence
  spacer sequence TTCN PAM
aucguggccgccggacgugg

SEQ ID NO: 36488 - RNA, 20 nt, Artificial Sequence
  spacer sequence TTCN PAM
uucuaucguggccgccggac

SEQ ID NO: 36489 - RNA, 20 nt, Artificial Sequence
  spacer sequence TTCN PAM
ucuuucuaucguggccgccg

SEQ ID NO: 36490 - RNA, 20 nt, Artificial Sequence
  spacer sequence TTCN PAM
uuucuucuuucuaucguggc

SEQ ID NO: 36491 - RNA, 20 nt, Artificial Sequence
  spacer sequence TTCN PAM
uacgauuuauuuuacuuacu

SEQ ID NO: 36492 - RNA, 20 nt, Artificial Sequence
  spacer sequence TTCN PAM
aaguaggugggaccacaggc

SEQ ID NO: 36493 - RNA, 20 nt, Artificial Sequence
  spacer sequence TTCN PAM
acugugacggccuuccaagu

SEQ ID NO: 36494 - RNA, 20 nt, Artificial Sequence
  spacer sequence TTCN PAM
agugauucuacugugacggc

SEQ ID NO: 36495 - RNA, 20 nt, Artificial Sequence
  spacer sequence TTCN PAM
cucuugucgcccaggcugga

SEQ ID NO: 36496 - RNA, 20 nt, Artificial Sequence
  spacer sequence TTCN PAM
uuuuuuuuuagcuggaguuu

SEQ ID NO: 36497 - RNA, 20 nt, Artificial Sequence
  spacer sequence TTCN PAM
uucuuuuuuuuuuagcugga

SEQ ID NO: 36498 - RNA, 20 nt, Artificial Sequence
  spacer sequence TTCN PAM
uucuuucuuuuuuuuuuagc

SEQ ID NO: 36499 - RNA, 20 nt, Artificial Sequence
  spacer sequence TTCN PAM
auucauaagcaauacauguu

SEQ ID NO: 36500 - RNA, 20 nt, Artificial Sequence
  spacer sequence TTCN PAM
uaagcaauacauguugagau

SEQ ID NO: 36501 - RNA, 20 nt, Artificial Sequence
  spacer sequence TTCN PAM
cgcugagcguucagagccca

SEQ ID NO: 36502 - RNA, 20 nt, Artificial Sequence
  spacer sequence TTCN PAM
gagcccaguguguauuuugc

SEQ ID NO: 36503 - RNA, 20 nt, Artificial Sequence
  spacer sequence TTCN PAM
uaauucucacaggaaauauu

SEQ ID NO: 36504 - RNA, 20 nt, Artificial Sequence
  spacer sequence TTCN PAM
cacaggaaauauucaaccug

SEQ ID NO: 36505 - RNA, 20 nt, Artificial Sequence
  spacer sequence TTCN PAM
ugugagaauuaggaagugga

SEQ ID NO: 36506 - RNA, 20 nt, Artificial Sequence
  spacer sequence TTCN PAM
accugcacuucaggccacua

SEQ ID NO: 36507 - RNA, 20 nt, Artificial Sequence
  spacer sequence TTCN PAM
ggccacuaaaguucuaguug

SEQ ID NO: 36508 - RNA, 20 nt, Artificial Sequence
  spacer sequence TTCN PAM
aguuggaaaaguggcuucac

SEQ ID NO: 36509 - RNA, 20 nt, Artificial Sequence
  spacer sequence TTCN PAM
aacuagaacuuuaguggccu

SEQ ID NO: 36510 - RNA, 20 nt, Artificial Sequence
  spacer sequence TTCN PAM
caaacccuagcuguugcaca

SEQ ID NO: 36511 - RNA, 20 nt, Artificial Sequence
  spacer sequence TTCN PAM
aauagcugcguccguuucua

SEQ ID NO: 36512 - RNA, 20 nt, Artificial Sequence
  spacer sequence TTCN PAM
aaguugauauucguguuaga

SEQ ID NO: 36513 - RNA, 20 nt, Artificial Sequence
  spacer sequence TTCN PAM
uguuagaaaggaggcuucag

SEQ ID NO: 36514 - RNA, 20 nt, Artificial Sequence
  spacer sequence TTCN PAM
aacacgaauaucaacuuaga

SEQ ID NO: 36515 - RNA, 20 nt, Artificial Sequence
  spacer sequence TTCN PAM
gggccaggcgcgguggcuga

SEQ ID NO: 36516 - RNA, 20 nt, Artificial Sequence
  spacer sequence TTCN PAM
agaccagccugaccaacaug

SEQ ID NO: 36517 - RNA, 20 nt, Artificial Sequence
  spacer sequence TTCN PAM
ccauguuggucaggcugguc

SEQ ID NO: 36518 - RNA, 20 nt, Artificial Sequence
  spacer sequence TTCN PAM
ccauauuggucaggcuaguc

SEQ ID NO: 36519 - RNA, 20 nt, Artificial Sequence
  spacer sequence TTCN PAM
gucucagacuccggaguagc

SEQ ID NO: 36520 - RNA, 20 nt, Artificial Sequence
  spacer sequence TTCN PAM
cccgccugagccuccugagu

SEQ ID NO: 36521 - RNA, 20 nt, Artificial Sequence
  spacer sequence TTCN PAM
agcgauucucccgccugagc

SEQ ID NO: 36522 - RNA, 20 nt, Artificial Sequence
  spacer sequence TTCN PAM
uccuuaaaccugaugcggga

SEQ ID NO: 36523 - RNA, 20 nt, Artificial Sequence
  spacer sequence TTCN PAM
uggcuacaacuccacacgua

SEQ ID NO: 36524 - RNA, 20 nt, Artificial Sequence
  spacer sequence TTCN PAM
auaaguagccaugugcaugc

SEQ ID NO: 36525 - RNA, 20 nt, Artificial Sequence
  spacer sequence TTCN PAM
ucccccacucuccuugcgac

SEQ ID NO: 36526 - RNA, 20 nt, Artificial Sequence
  spacer sequence TTCN PAM
agccuuguccaacaaggagg

SEQ ID NO: 36527 - RNA, 20 nt, Artificial Sequence
  spacer sequence TTCN PAM
uuggagugaggacccccauc

SEQ ID NO: 36528 - RNA, 20 nt, Artificial Sequence
  spacer sequence TTCN PAM
gggguccucauggcuuuuuc

SEQ ID NO: 36529 - RNA, 20 nt, Artificial Sequence
  spacer sequence TTCN PAM
ugacccagcugggccagcuc

SEQ ID NO: 36530 - RNA, 20 nt, Artificial Sequence
  spacer sequence TTCN PAM
ccucagggcaacacagucau

SEQ ID NO: 36531 - RNA, 20 nt, Artificial Sequence
  spacer sequence TTCN PAM
agaugacuguguugcccuga

SEQ ID NO: 36532 - RNA, 20 nt, Artificial Sequence
  spacer sequence TTCN PAM
cauggagggucccagccauc

SEQ ID NO: 36533 - RNA, 20 nt, Artificial Sequence
  spacer sequence TTCN PAM
uggcugggacccuccauggg

SEQ ID NO: 36534 - RNA, 20 nt, Artificial Sequence
  spacer sequence TTCN PAM
cauggagggucccagccagg

SEQ ID NO: 36535 - RNA, 20 nt, Artificial Sequence
  spacer sequence TTCN PAM
ugacggaggccgccgaggac

SEQ ID NO: 36536 - RNA, 20 nt, Artificial Sequence
  spacer sequence TTCN PAM
cggcauuguccucggcggcc

SEQ ID NO: 36537 - RNA, 20 nt, Artificial Sequence
  spacer sequence TTCN PAM
gccggcaacggggaccuccu

SEQ ID NO: 36538 - RNA, 20 nt, Artificial Sequence
  spacer sequence TTCN PAM
ugugggacuaggacucagac

SEQ ID NO: 36539 - RNA, 20 nt, Artificial Sequence
  spacer sequence TTCN PAM
cucuuccucgcucugucucu

SEQ ID NO: 36540 - RNA, 20 nt, Artificial Sequence
  spacer sequence TTCN PAM
ucgcucugucucugucucuc

SEQ ID NO: 36541 - RNA, 20 nt, Artificial Sequence
  spacer sequence TTCN PAM
uugaucugucucucccucuc

SEQ ID NO: 36542 - RNA, 20 nt, Artificial Sequence
  spacer sequence TTCN PAM
ucacucugucucugucucuc

SEQ ID NO: 36543 - RNA, 20 nt, Artificial Sequence
  spacer sequence TTCN PAM
ccaccucuggccguugaaac

SEQ ID NO: 36544 - RNA, 20 nt, Artificial Sequence
  spacer sequence TTCN PAM
acggccagagguggggaagg

SEQ ID NO: 36545 - RNA, 20 nt, Artificial Sequence
  spacer sequence TTCN PAM
cagaggcagagggacccgca

SEQ ID NO: 36546 - RNA, 20 nt, Artificial Sequence
  spacer sequence TTCN PAM
uguguccaucccaccugccc

SEQ ID NO: 36547 - RNA, 20 nt, Artificial Sequence
  spacer sequence TTCN PAM
ugcagguggggagggaccac

SEQ ID NO: 36548 - RNA, 20 nt, Artificial Sequence
  spacer sequence TTCN PAM
cagcccccgacccuacuucc

SEQ ID NO: 36549 - RNA, 20 nt, Artificial Sequence
  spacer sequence TTCN PAM
ccaggccugcugccccccgc

SEQ ID NO: 36550 - RNA, 20 nt, Artificial Sequence
  spacer sequence TTCN PAM
cgggaagggccugcaccucc

SEQ ID NO: 36551 - RNA, 20 nt, Artificial Sequence
  spacer sequence TTCN PAM
cgggaagcugggcccuuaac

SEQ ID NO: 36552 - RNA, 20 nt, Artificial Sequence
  spacer sequence TTCN PAM
ggugaggccuuucccggcac

SEQ ID NO: 36553 - RNA, 20 nt, Artificial Sequence
  spacer sequence TTCN PAM
cggcaccagccugggcagga

SEQ ID NO: 36554 - RNA, 20 nt, Artificial Sequence
  spacer sequence TTCN PAM
ccaccccgggccucaguuuc

SEQ ID NO: 36555 - RNA, 20 nt, Artificial Sequence
  spacer sequence TTCN PAM
cuccucuaggccucaguuuc

SEQ ID NO: 36556 - RNA, 20 nt, Artificial Sequence
  spacer sequence TTCN PAM
cuccuuugcacccagccccu

SEQ ID NO: 36557 - RNA, 20 nt, Artificial Sequence
  spacer sequence TTCN PAM
cuccucagcacccagccccu

SEQ ID NO: 36558 - RNA, 20 nt, Artificial Sequence
  spacer sequence TTCN PAM
cuccuuugcacccaggcccu

SEQ ID NO: 36559 - RNA, 20 nt, Artificial Sequence
  spacer sequence TTCN PAM
cuccucuggucccagcccca

SEQ ID NO: 36560 - RNA, 20 nt, Artificial Sequence
  spacer sequence TTCN PAM
cuccucugaucccagccccu

SEQ ID NO: 36561 - RNA, 20 nt, Artificial Sequence
  spacer sequence TTCN PAM
cuccucuggucccagccccg

SEQ ID NO: 36562 - RNA, 20 nt, Artificial Sequence
  spacer sequence TTCN PAM
cuccucugaucccagccccu

SEQ ID NO: 36563 - RNA, 20 nt, Artificial Sequence
  spacer sequence TTCN PAM
uccucuggucccagccccgc

SEQ ID NO: 36564 - RNA, 20 nt, Artificial Sequence
  spacer sequence TTCN PAM
cuccucuggucccagcccug

SEQ ID NO: 36565 - RNA, 20 nt, Artificial Sequence
  spacer sequence TTCN PAM
cuccucugacagguaagccg

SEQ ID NO: 36566 - RNA, 20 nt, Artificial Sequence
  spacer sequence TTCN PAM
aagcauugccaaucggcuua

SEQ ID NO: 36567 - RNA, 20 nt, Artificial Sequence
  spacer sequence TTCN PAM
auggccagggaaacugaggc

SEQ ID NO: 36568 - RNA, 20 nt, Artificial Sequence
  spacer sequence TTCN PAM
cuggccauggaauaaaaagc

SEQ ID NO: 36569 - RNA, 20 nt, Artificial Sequence
  spacer sequence TTCN PAM
ugcugaccucagggucuguc

SEQ ID NO: 36570 - RNA, 20 nt, Artificial Sequence
  spacer sequence TTCN PAM
cgcgugccugcggugcaugg

SEQ ID NO: 36571 - RNA, 20 nt, Artificial Sequence
  spacer sequence TTCN PAM
cagggugcucugcuccuagc

SEQ ID NO: 36572 - RNA, 20 nt, Artificial Sequence
  spacer sequence TTCN PAM
gcccacccccucacccccuc

SEQ ID NO: 36573 - RNA, 20 nt, Artificial Sequence
  spacer sequence TTCN PAM
gucuccgcugguggcuuguu

SEQ ID NO: 36574 - RNA, 20 nt, Artificial Sequence
  spacer sequence TTCN PAM
uccaagccccgcacacuggu

SEQ ID NO: 36575 - RNA, 20 nt, Artificial Sequence
  spacer sequence TTCN PAM
agugcguuuggaagaugagg

SEQ ID NO: 36576 - RNA, 20 nt, Artificial Sequence
  spacer sequence TTCN PAM
aaacgcacuggaauccaccc

SEQ ID NO: 36577 - RNA, 20 nt, Artificial Sequence
  spacer sequence TTCN PAM
caggacucgcugauggcagc

SEQ ID NO: 36578 - RNA, 20 nt, Artificial Sequence
  spacer sequence TTCN PAM
agaucccucuuguggaccga

SEQ ID NO: 36579 - RNA, 20 nt, Artificial Sequence
  spacer sequence TTCN PAM
uuggucuacacugagaccug

SEQ ID NO: 36580 - RNA, 20 nt, Artificial Sequence
  spacer sequence TTCN PAM
aucacacgggcagaggccgc

SEQ ID NO: 36581 - RNA, 20 nt, Artificial Sequence
  spacer sequence TTCN PAM
uuccaucacacgggcagagg

SEQ ID NO: 36582 - RNA, 20 nt, Artificial Sequence
  spacer sequence TTCN PAM
guccagggggccuccauccc

SEQ ID NO: 36583 - RNA, 20 nt, Artificial Sequence
  spacer sequence TTCN PAM
ccugacccccaggggacccc

SEQ ID NO: 36584 - RNA, 20 nt, Artificial Sequence
  spacer sequence TTCN PAM
ggagcugcaggccgggucuu

SEQ ID NO: 36585 - RNA, 20 nt, Artificial Sequence
  spacer sequence TTCN PAM
cgggcggccgcacaggggcg

SEQ ID NO: 36586 - RNA, 20 nt, Artificial Sequence
  spacer sequence TTCN PAM
aggccagccugcccaacaug

SEQ ID NO: 36587 - RNA, 20 nt, Artificial Sequence
  spacer sequence TTCN PAM
ccauguugggcaggcuggcc

SEQ ID NO: 36588 - RNA, 20 nt, Artificial Sequence
  spacer sequence TTCN PAM
ccugccucagccacuccagu

SEQ ID NO: 36589 - RNA, 20 nt, Artificial Sequence
  spacer sequence TTCN PAM
cucuuguugcccaggcugga

SEQ ID NO: 36590 - RNA, 20 nt, Artificial Sequence
  spacer sequence TTCN PAM
gaguuucgcucuuguugccc

SEQ ID NO: 36591 - RNA, 20 nt, Artificial Sequence
  spacer sequence TTCN PAM
uuuuuuucugaguuucgcuc

SEQ ID NO: 36592 - RNA, 20 nt, Artificial Sequence
  spacer sequence TTCN PAM
uuucuuuuuuuucugaguuu

SEQ ID NO: 36593 - RNA, 20 nt, Artificial Sequence
  spacer sequence TTCN PAM
augcacuugaccucgacccu

SEQ ID NO: 36594 - RNA, 20 nt, Artificial Sequence
  spacer sequence TTCN PAM
cgugccugaauaugaggcuu

SEQ ID NO: 36595 - RNA, 20 nt, Artificial Sequence
  spacer sequence TTCN PAM
ggcacgggaagaucgcagac

SEQ ID NO: 36596 - RNA, 20 nt, Artificial Sequence
  spacer sequence TTCN PAM
aagccucauauucaggcacg

SEQ ID NO: 36597 - RNA, 20 nt, Artificial Sequence
  spacer sequence TTCN PAM
ugccugcccguccugagugg

SEQ ID NO: 36598 - RNA, 20 nt, Artificial Sequence
  spacer sequence TTCN PAM
uggccugacccccgacccug

SEQ ID NO: 36599 - RNA, 20 nt, Artificial Sequence
  spacer sequence TTCN PAM
caaggggcuuuccuggccug

SEQ ID NO: 36600 - RNA, 20 nt, Artificial Sequence
  spacer sequence TTCN PAM
cgccgcccggcgaccccgcu

SEQ ID NO: 36601 - RNA, 20 nt, Artificial Sequence
  spacer sequence TTCN PAM
ccgcggccucgggacagagg

SEQ ID NO: 36602 - RNA, 20 nt, Artificial Sequence
  spacer sequence TTCN PAM
gacuggcccuccugcuggcg

SEQ ID NO: 36603 - RNA, 20 nt, Artificial Sequence
  spacer sequence TTCN PAM
ggggcuccuccucggugaga

SEQ ID NO: 36604 - RNA, 20 nt, Artificial Sequence
  spacer sequence TTCN PAM
caccgaggaggagccccaga

SEQ ID NO: 36605 - RNA, 20 nt, Artificial Sequence
  spacer sequence TTCN PAM
ucucccccgagcccccuccc

SEQ ID NO: 36606 - RNA, 20 nt, Artificial Sequence
  spacer sequence TTCN PAM
cucuccugagcccccuccac

SEQ ID NO: 36607 - RNA, 20 nt, Artificial Sequence
  spacer sequence TTCN PAM
cucuccugagccccuucucu

SEQ ID NO: 36608 - RNA, 20 nt, Artificial Sequence
  spacer sequence TTCN PAM
cuuuacugcgcccccugcuc

SEQ ID NO: 36609 - RNA, 20 nt, Artificial Sequence
  spacer sequence TTCN PAM
aaacccccuccccucucccg

SEQ ID NO: 36610 - RNA, 20 nt, Artificial Sequence
  spacer sequence TTCN PAM
cuuccaaacccccuccccuc

SEQ ID NO: 36611 - RNA, 20 nt, Artificial Sequence
  spacer sequence TTCN PAM
gaagagaaggggggcccggg

SEQ ID NO: 36612 - RNA, 20 nt, Artificial Sequence
  spacer sequence TTCN PAM
gaacccccuccccucucccg

SEQ ID NO: 36613 - RNA, 20 nt, Artificial Sequence
  spacer sequence TTCN PAM
cuuccgaacccccuccccuc

SEQ ID NO: 36614 - RNA, 20 nt, Artificial Sequence
  spacer sequence TTCN PAM
ucucccccgggcccccuccc

SEQ ID NO: 36615 - RNA, 20 nt, Artificial Sequence
  spacer sequence TTCN PAM
ccucucagccccugccuccu

SEQ ID NO: 36616 - RNA, 20 nt, Artificial Sequence
  spacer sequence TTCN PAM
cugcgggucagggggccgcg

SEQ ID NO: 36617 - RNA, 20 nt, Artificial Sequence
  spacer sequence TTCN PAM
ggggacuggggcagaggcgg

SEQ ID NO: 36618 - RNA, 20 nt, Artificial Sequence
  spacer sequence TTCN PAM
gggaccgagccugggagucc

SEQ ID NO: 36619 - RNA, 20 nt, Artificial Sequence
  spacer sequence TTCN PAM
cggacccuccgcugcacccc

SEQ ID NO: 36620 - RNA, 20 nt, Artificial Sequence
  spacer sequence TTCN PAM
ccuggagggacuggccugcg

SEQ ID NO: 36621 - RNA, 20 nt, Artificial Sequence
  spacer sequence TTCN PAM
agcacaccgugcagcuccuu

SEQ ID NO: 36622 - RNA, 20 nt, Artificial Sequence
  spacer sequence TTCN PAM
cuaugccaccucuuccugga

SEQ ID NO: 36623 - RNA, 20 nt, Artificial Sequence
  spacer sequence TTCN PAM
uggaagccucccagauugca

SEQ ID NO: 36624 - RNA, 20 nt, Artificial Sequence
  spacer sequence TTCN PAM
aggaagagguggcauaggga

SEQ ID NO: 36625 - RNA, 20 nt, Artificial Sequence
  spacer sequence TTCN PAM
ccauguuggccaggauggcc

SEQ ID NO: 36626 - RNA, 20 nt, Artificial Sequence
  spacer sequence TTCN PAM
cacaucuugagaaaaacaug

SEQ ID NO: 36627 - RNA, 20 nt, Artificial Sequence
  spacer sequence TTCN PAM
caagaugugagaaauguugg

SEQ ID NO: 36628 - RNA, 20 nt, Artificial Sequence
  spacer sequence TTCN PAM
ugcuuaccucccuagcacgg

SEQ ID NO: 36629 - RNA, 20 nt, Artificial Sequence
  spacer sequence TTCN PAM
ucaguuuauuacaggcccag

SEQ ID NO: 36630 - RNA, 20 nt, Artificial Sequence
  spacer sequence TTCN PAM
cucuguagucaguggaccuu

SEQ ID NO: 36631 - RNA, 20 nt, Artificial Sequence
  spacer sequence TTCN PAM
cuuuuaacuugaguguaagg

SEQ ID NO: 36632 - RNA, 20 nt, Artificial Sequence
  spacer sequence TTCN PAM
augacuacuacuauuagguu

SEQ ID NO: 36633 - RNA, 20 nt, Artificial Sequence
  spacer sequence TTCN PAM
cuaauuccuucuucacuggg

SEQ ID NO: 36634 - RNA, 20 nt, Artificial Sequence
  spacer sequence TTCN PAM
uucuucacuggggccagaug

SEQ ID NO: 36635 - RNA, 20 nt, Artificial Sequence
  spacer sequence TTCN PAM
ucacuggggccagaugcccc

SEQ ID NO: 36636 - RNA, 20 nt, Artificial Sequence
  spacer sequence TTCN PAM
cuggggccagaugccccaga

SEQ ID NO: 36637 - RNA, 20 nt, Artificial Sequence
  spacer sequence TTCN PAM
agacauuuacugagcaccua

SEQ ID NO: 36638 - RNA, 20 nt, Artificial Sequence
  spacer sequence TTCN PAM
gggcaccagggcuauaacca

SEQ ID NO: 36639 - RNA, 20 nt, Artificial Sequence
  spacer sequence TTCN PAM
ucuugguuauagcccuggug

SEQ ID NO: 36640 - RNA, 20 nt, Artificial Sequence
  spacer sequence TTCN PAM
ggcccuggagggcaggugcu

SEQ ID NO: 36641 - RNA, 20 nt, Artificial Sequence
  spacer sequence TTCN PAM
ugucucccaccagugugagc

SEQ ID NO: 36642 - RNA, 20 nt, Artificial Sequence
  spacer sequence TTCN PAM
uaguggucauccugucucac

SEQ ID NO: 36643 - RNA, 20 nt, Artificial Sequence
  spacer sequence TTCN PAM
uccuaguggucauccugucu

SEQ ID NO: 36644 - RNA, 20 nt, Artificial Sequence
  spacer sequence TTCN PAM
uccuguuuucuuccuagugg

SEQ ID NO: 36645 - RNA, 20 nt, Artificial Sequence
  spacer sequence TTCN PAM
cccagaucucccucaccucc

SEQ ID NO: 36646 - RNA, 20 nt, Artificial Sequence
  spacer sequence TTCN PAM
cagcuccaacuggaccggcc

SEQ ID NO: 36647 - RNA, 20 nt, Artificial Sequence
  spacer sequence TTCN PAM
agcccccacccauccuggcc

SEQ ID NO: 36648 - RNA, 20 nt, Artificial Sequence
  spacer sequence TTCN PAM
agcccccacccagccuggcc

SEQ ID NO: 36649 - RNA, 20 nt, Artificial Sequence
  spacer sequence TTCN PAM
uccucccagcacccccucag

SEQ ID NO: 36650 - RNA, 20 nt, Artificial Sequence
  spacer sequence TTCN PAM
ucccagcaccccccagcccg

SEQ ID NO: 36651 - RNA, 20 nt, Artificial Sequence
  spacer sequence TTCN PAM
cagccccuacucaaccuggg

SEQ ID NO: 36652 - RNA, 20 nt, Artificial Sequence
  spacer sequence TTCN PAM
cagccccuacucaaccuggg

SEQ ID NO: 36653 - RNA, 20 nt, Artificial Sequence
  spacer sequence TTCN PAM
cccagcuagggccucuccuc

SEQ ID NO: 36654 - RNA, 20 nt, Artificial Sequence
  spacer sequence TTCN PAM
gggauagagggugaggagga

SEQ ID NO: 36655 - RNA, 20 nt, Artificial Sequence
  spacer sequence TTCN PAM
acaacaacgugagcguggcc

SEQ ID NO: 36656 - RNA, 20 nt, Artificial Sequence
  spacer sequence TTCN PAM
ugcgcccgccggcgcucagg

SEQ ID NO: 36657 - RNA, 20 nt, Artificial Sequence
  spacer sequence TTCN PAM
gcgcgggcacacucaccugc

SEQ ID NO: 36658 - RNA, 20 nt, Artificial Sequence
  spacer sequence TTCN PAM
ugcugcuggaguucguggcg

SEQ ID NO: 36659 - RNA, 20 nt, Artificial Sequence
  spacer sequence TTCN PAM
uggcgcgcgccggcgcgcuc

SEQ ID NO: 36660 - RNA, 20 nt, Artificial Sequence
  spacer sequence TTCN PAM
agcugcuggaggacucggcc

SEQ ID NO: 36661 - RNA, 20 nt, Artificial Sequence
  spacer sequence TTCN PAM
uggaggccggcucgcgcuug

SEQ ID NO: 36662 - RNA, 20 nt, Artificial Sequence
  spacer sequence TTCN PAM
ggagagggccgccgcgcucu

SEQ ID NO: 36663 - RNA, 20 nt, Artificial Sequence
  spacer sequence TTCN PAM
ucgcgaaggucaagccggug

SEQ ID NO: 36664 - RNA, 20 nt, Artificial Sequence
  spacer sequence TTCN PAM
cgaugaagagcgcggcggcc

SEQ ID NO: 36665 - RNA, 20 nt, Artificial Sequence
  spacer sequence TTCN PAM
gccugggugacagagcaaga

SEQ ID NO: 36666 - RNA, 20 nt, Artificial Sequence
  spacer sequence TTCN PAM
gccagugucuuuauucauga

SEQ ID NO: 36667 - RNA, 20 nt, Artificial Sequence
  spacer sequence TTCN PAM
ugaagaccaaaaacuagaac

SEQ ID NO: 36668 - RNA, 20 nt, Artificial Sequence
  spacer sequence TTCN PAM
ugaauaaagacacuggccga

SEQ ID NO: 36669 - RNA, 20 nt, Artificial Sequence
  spacer sequence TTCN PAM
aguuuuuggucuucaugaau

SEQ ID NO: 36670 - RNA, 20 nt, Artificial Sequence
  spacer sequence TTCN PAM
ccagcggacggauauuugcg

SEQ ID NO: 36671 - RNA, 20 nt, Artificial Sequence
  spacer sequence TTCN PAM
acuccugggaggucccuaga

SEQ ID NO: 36672 - RNA, 20 nt, Artificial Sequence
  spacer sequence TTCN PAM
gaggcaggaaguaguggccg

SEQ ID NO: 36673 - RNA, 20 nt, Artificial Sequence
  spacer sequence TTCN PAM
ugccucugaauuggucucua

SEQ ID NO: 36674 - RNA, 20 nt, Artificial Sequence
  spacer sequence TTCN PAM
ccauguugaccaggcugguc

SEQ ID NO: 36675 - RNA, 20 nt, Artificial Sequence
  spacer sequence TTCN PAM
uaguagagacgagguuucac

SEQ ID NO: 36676 - RNA, 20 nt, Artificial Sequence
  spacer sequence TTCN PAM
uauucuuaguagagacgagg

SEQ ID NO: 36677 - RNA, 20 nt, Artificial Sequence
  spacer sequence TTCN PAM
cgccauacuccggccucagc

SEQ ID NO: 36678 - RNA, 20 nt, Artificial Sequence
  spacer sequence TTCN PAM
gagauggagucucgcucugu

SEQ ID NO: 36679 - RNA, 20 nt, Artificial Sequence
  spacer sequence TTCN PAM
ucucgaguccucuuugagaa

SEQ ID NO: 36680 - RNA, 20 nt, Artificial Sequence
  spacer sequence TTCN PAM
caaagaggacucgagaugaa

SEQ ID NO: 36681 - RNA, 20 nt, Artificial Sequence
  spacer sequence TTCN PAM
aaaaugcucaaggauggagg

SEQ ID NO: 36682 - RNA, 20 nt, Artificial Sequence
  spacer sequence TTCN PAM
ugugggggaggugaggugac

SEQ ID NO: 36683 - RNA, 20 nt, Artificial Sequence
  spacer sequence TTCN PAM
cugcuggugcuggcccuggg

SEQ ID NO: 36684 - RNA, 20 nt, Artificial Sequence
  spacer sequence TTCN PAM
uccuuguuuggagggggacu

SEQ ID NO: 36685 - RNA, 20 nt, Artificial Sequence
  spacer sequence TTCN PAM
ccccgaguggacaucccggg

SEQ ID NO: 36686 - RNA, 20 nt, Artificial Sequence
  spacer sequence TTCN PAM
ggcugcugccgggaggaugg

SEQ ID NO: 36687 - RNA, 20 nt, Artificial Sequence
  spacer sequence TTCN PAM
ccaagucucagucuccuacu

SEQ ID NO: 36688 - RNA, 20 nt, Artificial Sequence
  spacer sequence TTCN PAM
cccucacugcugggcaccua

SEQ ID NO: 36689 - RNA, 20 nt, Artificial Sequence
  spacer sequence TTCN PAM
agcuggacugagugacaggg

SEQ ID NO: 36690 - RNA, 20 nt, Artificial Sequence
  spacer sequence TTCN PAM
uggguccccaacucaucaag

SEQ ID NO: 36691 - RNA, 20 nt, Artificial Sequence
  spacer sequence TTCN PAM
uaccucuguccaucuucuug

SEQ ID NO: 36692 - RNA, 20 nt, Artificial Sequence
  spacer sequence TTCN PAM
ucccauuuuuauuuccuucc

SEQ ID NO: 36693 - RNA, 20 nt, Artificial Sequence
  spacer sequence TTCN PAM
uuccacccauggguccauca

SEQ ID NO: 36694 - RNA, 20 nt, Artificial Sequence
  spacer sequence TTCN PAM
acccauggguccaucauccc

SEQ ID NO: 36695 - RNA, 20 nt, Artificial Sequence
  spacer sequence TTCN PAM
uucccucuacccguccgucc

SEQ ID NO: 36696 - RNA, 20 nt, Artificial Sequence
  spacer sequence TTCN PAM
cucuacccguccguccaccc

SEQ ID NO: 36697 - RNA, 20 nt, Artificial Sequence
  spacer sequence TTCN PAM
uccuuccauucuuccaccca

SEQ ID NO: 36698 - RNA, 20 nt, Artificial Sequence
  spacer sequence TTCN PAM
auucuuccacccacccaucc

SEQ ID NO: 36699 - RNA, 20 nt, Artificial Sequence
  spacer sequence TTCN PAM
uccacccacccauccaucau

SEQ ID NO: 36700 - RNA, 20 nt, Artificial Sequence
  spacer sequence TTCN PAM
acccacccauccaucaucca

SEQ ID NO: 36701 - RNA, 20 nt, Artificial Sequence
  spacer sequence TTCN PAM
uucccccuuccuucccuccg

SEQ ID NO: 36702 - RNA, 20 nt, Artificial Sequence
  spacer sequence TTCN PAM
cccuuccuucccuccgccag

SEQ ID NO: 36703 - RNA, 20 nt, Artificial Sequence
  spacer sequence TTCN PAM
uucccuccgccaguccaucc

SEQ ID NO: 36704 - RNA, 20 nt, Artificial Sequence
  spacer sequence TTCN PAM
cuccgccaguccauccaccc

SEQ ID NO: 36705 - RNA, 20 nt, Artificial Sequence
  spacer sequence TTCN PAM
uccuuccucccauucuucca

SEQ ID NO: 36706 - RNA, 20 nt, Artificial Sequence
  spacer sequence TTCN PAM
ucccauucuuccacccaccc

SEQ ID NO: 36707 - RNA, 20 nt, Artificial Sequence
  spacer sequence TTCN PAM
uccacccacccguccaucca

SEQ ID NO: 36708 - RNA, 20 nt, Artificial Sequence
  spacer sequence TTCN PAM
acccacccguccauccauca

SEQ ID NO: 36709 - RNA, 20 nt, Artificial Sequence
  spacer sequence TTCN PAM
accucccuccuucccuccac

SEQ ID NO: 36710 - RNA, 20 nt, Artificial Sequence
  spacer sequence TTCN PAM
cuccacccgucauccuuccc

SEQ ID NO: 36711 - RNA, 20 nt, Artificial Sequence
  spacer sequence TTCN PAM
cucccuccuuccauguaucc

SEQ ID NO: 36712 - RNA, 20 nt, Artificial Sequence
  spacer sequence TTCN PAM
auguauccacccauccaucc

SEQ ID NO: 36713 - RNA, 20 nt, Artificial Sequence
  spacer sequence TTCN PAM
uuuccccccuccuucccucc

SEQ ID NO: 36714 - RNA, 20 nt, Artificial Sequence
  spacer sequence TTCN PAM
ccccuccuucccuccucccu

SEQ ID NO: 36715 - RNA, 20 nt, Artificial Sequence
  spacer sequence TTCN PAM
cuccucccucccauccaucc

SEQ ID NO: 36716 - RNA, 20 nt, Artificial Sequence
  spacer sequence TTCN PAM
uccuuccaucccuccuuccu

SEQ ID NO: 36717 - RNA, 20 nt, Artificial Sequence
  spacer sequence TTCN PAM
aucccuccuuccuuucuccc

SEQ ID NO: 36718 - RNA, 20 nt, Artificial Sequence
  spacer sequence TTCN PAM
uuucucccgugcuucugugu

SEQ ID NO: 36719 - RNA, 20 nt, Artificial Sequence
  spacer sequence TTCN PAM
cccgugcuucuguguaucca

SEQ ID NO: 36720 - RNA, 20 nt, Artificial Sequence
  spacer sequence TTCN PAM
guguauccauccguauuugc

SEQ ID NO: 36721 - RNA, 20 nt, Artificial Sequence
  spacer sequence TTCN PAM
aggccugcccuccugucuga

SEQ ID NO: 36722 - RNA, 20 nt, Artificial Sequence
  spacer sequence TTCN PAM
agucagacaggagggcaggc

SEQ ID NO: 36723 - RNA, 20 nt, Artificial Sequence
  spacer sequence TTCN PAM
uccgcucugcacagucucau

SEQ ID NO: 36724 - RNA, 20 nt, Artificial Sequence
  spacer sequence TTCN PAM
ucccuugguuuaugcucguc

SEQ ID NO: 36725 - RNA, 20 nt, Artificial Sequence
  spacer sequence TTCN PAM
cccaccggcuuccucccuug

SEQ ID NO: 36726 - RNA, 20 nt, Artificial Sequence
  spacer sequence TTCN PAM
cugcaggacccccccaaauc

SEQ ID NO: 36727 - RNA, 20 nt, Artificial Sequence
  spacer sequence TTCN PAM
gagccccagccccgugcgcc

SEQ ID NO: 36728 - RNA, 20 nt, Artificial Sequence
  spacer sequence TTCN PAM
ugcagaucuuccacaugacc

SEQ ID NO: 36729 - RNA, 20 nt, Artificial Sequence
  spacer sequence TTCN PAM
acaugaccuaugaccuggcc

SEQ ID NO: 36730 - RNA, 20 nt, Artificial Sequence
  spacer sequence TTCN PAM
uggugccuaugcugcaggac

SEQ ID NO: 36731 - RNA, 20 nt, Artificial Sequence
  spacer sequence TTCN PAM
cgcgcaacugcugggugucc

SEQ ID NO: 36732 - RNA, 20 nt, Artificial Sequence
  spacer sequence TTCN PAM
acccucuguaagcgggauaa

SEQ ID NO: 36733 - RNA, 20 nt, Artificial Sequence
  spacer sequence TTCN PAM
gagguggggacccaggcgcc

SEQ ID NO: 36734 - RNA, 20 nt, Artificial Sequence
  spacer sequence TTCN PAM
gaggcggggacccaggcgcc

SEQ ID NO: 36735 - RNA, 20 nt, Artificial Sequence
  spacer sequence TTCN PAM
gagguggggacccaggcgcc

SEQ ID NO: 36736 - RNA, 20 nt, Artificial Sequence
  spacer sequence TTCN PAM
gagguggggacccaggcgcc

SEQ ID NO: 36737 - RNA, 20 nt, Artificial Sequence
  spacer sequence TTCN PAM
cuccauaagggggcgccugg

SEQ ID NO: 36738 - RNA, 20 nt, Artificial Sequence
  spacer sequence TTCN PAM
gggguggggacaagaccccc

SEQ ID NO: 36739 - RNA, 20 nt, Artificial Sequence
  spacer sequence TTCN PAM
gacccccagggacauuaagg

SEQ ID NO: 36740 - RNA, 20 nt, Artificial Sequence
  spacer sequence TTCN PAM
aaguggcuguuucagacccc

SEQ ID NO: 36741 - RNA, 20 nt, Artificial Sequence
  spacer sequence TTCN PAM
ggccugggaucauccgugga

SEQ ID NO: 36742 - RNA, 20 nt, Artificial Sequence
  spacer sequence TTCN PAM
cuccacggaugaucccaggc

SEQ ID NO: 36743 - RNA, 20 nt, Artificial Sequence
  spacer sequence TTCN PAM
aauggauuucccuuuuaauu

SEQ ID NO: 36744 - RNA, 20 nt, Artificial Sequence
  spacer sequence TTCN PAM
cuuuuaauuaacccacauua

SEQ ID NO: 36745 - RNA, 20 nt, Artificial Sequence
  spacer sequence TTCN PAM
cucugucgcccaggcuggag

SEQ ID NO: 36746 - RNA, 20 nt, Artificial Sequence
  spacer sequence TTCN PAM
cucagcuucaaguggcgcgc

SEQ ID NO: 36747 - RNA, 20 nt, Artificial Sequence
  spacer sequence TTCN PAM
aguggcgcgcucagggcaga

SEQ ID NO: 36748 - RNA, 20 nt, Artificial Sequence
  spacer sequence TTCN PAM
ccuccuaaucacagccacag

SEQ ID NO: 36749 - RNA, 20 nt, Artificial Sequence
  spacer sequence TTCN PAM
cugacccugugacagggagg

SEQ ID NO: 36750 - RNA, 20 nt, Artificial Sequence
  spacer sequence TTCN PAM
ugcccagccugcauccccuc

SEQ ID NO: 36751 - RNA, 20 nt, Artificial Sequence
  spacer sequence TTCN PAM
cgauguccaaagacugaccc

SEQ ID NO: 36752 - RNA, 20 nt, Artificial Sequence
  spacer sequence TTCN PAM
gcccgggggcuucccgaugu

SEQ ID NO: 36753 - RNA, 20 nt, Artificial Sequence
  spacer sequence TTCN PAM
cuaacccagccccauccuga

SEQ ID NO: 36754 - RNA, 20 nt, Artificial Sequence
  spacer sequence TTCN PAM
ggacacgccgguggccggca

SEQ ID NO: 36755 - RNA, 20 nt, Artificial Sequence
  spacer sequence TTCN PAM
gggagagcaaggcugcccca

SEQ ID NO: 36756 - RNA, 20 nt, Artificial Sequence
  spacer sequence TTCN PAM
ccauguuaggcggcuggcug

SEQ ID NO: 36757 - RNA, 20 nt, Artificial Sequence
  spacer sequence TTCN PAM
ggacagcagggcgccuggca

SEQ ID NO: 36758 - RNA, 20 nt, Artificial Sequence
  spacer sequence TTCN PAM
gcugagcucagggcagcugc

SEQ ID NO: 36759 - RNA, 20 nt, Artificial Sequence
  spacer sequence TTCN PAM
gccccagccccgcccggccg

SEQ ID NO: 36760 - RNA, 20 nt, Artificial Sequence
  spacer sequence TTCN PAM
cugcucaggaggggcugacc

SEQ ID NO: 36761 - RNA, 20 nt, Artificial Sequence
  spacer sequence TTCN PAM
ggaaagaucaucagggaagg

SEQ ID NO: 36762 - RNA, 20 nt, Artificial Sequence
  spacer sequence TTCN PAM
agaaaccaucgggucagccc

SEQ ID NO: 36763 - RNA, 20 nt, Artificial Sequence
  spacer sequence TTCN PAM
cugaugaucuuuccagaaac

SEQ ID NO: 36764 - RNA, 20 nt, Artificial Sequence
  spacer sequence TTCN PAM
cgggggcucuggcccuuccc

SEQ ID NO: 36765 - RNA, 20 nt, Artificial Sequence
  spacer sequence TTCN PAM
ucagggauaggguugcuaga

SEQ ID NO: 36766 - RNA, 20 nt, Artificial Sequence
  spacer sequence TTCN PAM
gggcacccggccuggugcag

SEQ ID NO: 36767 - RNA, 20 nt, Artificial Sequence
  spacer sequence TTCN PAM
agaccagccugugcaauaug

SEQ ID NO: 36768 - RNA, 20 nt, Artificial Sequence
  spacer sequence TTCN PAM
uuuauuuuuuguggagauga

SEQ ID NO: 36769 - RNA, 20 nt, Artificial Sequence
  spacer sequence TTCN PAM
gagacacugucucgcucugu

SEQ ID NO: 36770 - RNA, 20 nt, Artificial Sequence
  spacer sequence TTCN PAM
auuuuuuuuuucugagacac

SEQ ID NO: 36771 - RNA, 20 nt, Artificial Sequence
  spacer sequence TTCN PAM
augauaaauuccauuuuuuu

SEQ ID NO: 36772 - RNA, 20 nt, Artificial Sequence
  spacer sequence TTCN PAM
uuucaaugauaaauuccauu

SEQ ID NO: 36773 - RNA, 20 nt, Artificial Sequence
  spacer sequence TTCN PAM
acuuugauuuaaauagaagc

SEQ ID NO: 36774 - RNA, 20 nt, Artificial Sequence
  spacer sequence TTCN PAM
auuuaaaucaaaguugaauu

SEQ ID NO: 36775 - RNA, 20 nt, Artificial Sequence
  spacer sequence TTCN PAM
acaagagcaaauaaacaugc

SEQ ID NO: 36776 - RNA, 20 nt, Artificial Sequence
  spacer sequence TTCN PAM
caccugcuuguacugugggg

SEQ ID NO: 36777 - RNA, 20 nt, Artificial Sequence
  spacer sequence TTCN PAM
acaagcugccagcugacuuc

SEQ ID NO: 36778 - RNA, 20 nt, Artificial Sequence
  spacer sequence TTCN PAM
gccagaagauccacgacuac

SEQ ID NO: 36779 - RNA, 20 nt, Artificial Sequence
  spacer sequence TTCN PAM
ggcggaagucagcuggcagc

SEQ ID NO: 36780 - RNA, 20 nt, Artificial Sequence
  spacer sequence TTCN PAM
cgcugcccccuuagcagaac

SEQ ID NO: 36781 - RNA, 20 nt, Artificial Sequence
  spacer sequence TTCN PAM
gcuaagggggcagcgggaag

SEQ ID NO: 36782 - RNA, 20 nt, Artificial Sequence
  spacer sequence TTCN PAM
gccccgcccugucaggcaca

SEQ ID NO: 36783 - RNA, 20 nt, Artificial Sequence
  spacer sequence TTCN PAM
gguagccugagugacccugg

SEQ ID NO: 36784 - RNA, 20 nt, Artificial Sequence
  spacer sequence TTCN PAM
caggguugcgggaacaaaua

SEQ ID NO: 36785 - RNA, 20 nt, Artificial Sequence
  spacer sequence TTCN PAM
cgcaacccugggaaacuugc

SEQ ID NO: 36786 - RNA, 20 nt, Artificial Sequence
  spacer sequence TTCN PAM
agccacucagccugugggua

SEQ ID NO: 36787 - RNA, 20 nt, Artificial Sequence
  spacer sequence TTCN PAM
gccucccaccguccuggagg

SEQ ID NO: 36788 - RNA, 20 nt, Artificial Sequence
  spacer sequence TTCN PAM
ggccuccaggacggugggag

SEQ ID NO: 36789 - RNA, 20 nt, Artificial Sequence
  spacer sequence TTCN PAM
ugccucuuccggcgucuggg

SEQ ID NO: 36790 - RNA, 20 nt, Artificial Sequence
  spacer sequence TTCN PAM
ggcgucuggggcuccaggcg

SEQ ID NO: 36791 - RNA, 20 nt, Artificial Sequence
  spacer sequence TTCN PAM
ccccugugugucucugucuc

SEQ ID NO: 36792 - RNA, 20 nt, Artificial Sequence
  spacer sequence TTCN PAM
uguaaauucauccgucguug

SEQ ID NO: 36793 - RNA, 20 nt, Artificial Sequence
  spacer sequence TTCN PAM
uccgucguuggaucagggcc

SEQ ID NO: 36794 - RNA, 20 nt, Artificial Sequence
  spacer sequence TTCN PAM
ucguggccucgccuuaacug

SEQ ID NO: 36795 - RNA, 20 nt, Artificial Sequence
  spacer sequence TTCN PAM
acauaagguccuauucacag

SEQ ID NO: 36796 - RNA, 20 nt, Artificial Sequence
  spacer sequence TTCN PAM
caggaaccgggggucaggau

SEQ ID NO: 36797 - RNA, 20 nt, Artificial Sequence
  spacer sequence TTCN PAM
ugugaauaggaccuuaugug

SEQ ID NO: 36798 - RNA, 20 nt, Artificial Sequence
  spacer sequence TTCN PAM
gggagauguaguucaaccca

SEQ ID NO: 36799 - RNA, 20 nt, Artificial Sequence
  spacer sequence TTCN PAM
acccacaacacacaucaaac

SEQ ID NO: 36800 - RNA, 20 nt, Artificial Sequence
  spacer sequence TTCN PAM
agcacacggcagggcacgca

SEQ ID NO: 36801 - RNA, 20 nt, Artificial Sequence
  spacer sequence TTCN PAM
ugagggugggaccuucaagc

SEQ ID NO: 36802 - RNA, 20 nt, Artificial Sequence
  spacer sequence TTCN PAM
cagagcugcucucugcugcc

SEQ ID NO: 36803 - RNA, 20 nt, Artificial Sequence
  spacer sequence TTCN PAM
cggggcccgaggucccuagu

SEQ ID NO: 36804 - RNA, 20 nt, Artificial Sequence
  spacer sequence TTCN PAM
cuucgccaagaauguuuaau

SEQ ID NO: 36805 - RNA, 20 nt, Artificial Sequence
  spacer sequence TTCN PAM
ccaagaauguuuaauugcau

SEQ ID NO: 36806 - RNA, 20 nt, Artificial Sequence
  spacer sequence TTCN PAM
uggcgaagcgaaccgcagug

SEQ ID NO: 36807 - RNA, 20 nt, Artificial Sequence
  spacer sequence TTCN PAM
auucauucauuuguagagau

SEQ ID NO: 36808 - RNA, 20 nt, Artificial Sequence
  spacer sequence TTCN PAM
uucauuuguagagauauaac

SEQ ID NO: 36809 - RNA, 20 nt, Artificial Sequence
  spacer sequence TTCN PAM
uuuguagagauauaacacuc

SEQ ID NO: 36810 - RNA, 20 nt, Artificial Sequence
  spacer sequence TTCN PAM
ggagugaggcugugguaucg

SEQ ID NO: 36811 - RNA, 20 nt, Artificial Sequence
  spacer sequence TTCN PAM
caugggcccaaaaggagacc

SEQ ID NO: 36812 - RNA, 20 nt, Artificial Sequence
  spacer sequence TTCN PAM
gaggccgagacgggcagauc

SEQ ID NO: 36813 - RNA, 20 nt, Artificial Sequence
  spacer sequence TTCN PAM
agaccagccuggccaacaug

SEQ ID NO: 36814 - RNA, 20 nt, Artificial Sequence
  spacer sequence TTCN PAM
ccauguuggccaggcugguc

SEQ ID NO: 36815 - RNA, 20 nt, Artificial Sequence
  spacer sequence TTCN PAM
ccugucucagccuccagagu

SEQ ID NO: 36816 - RNA, 20 nt, Artificial Sequence
  spacer sequence TTCN PAM
agcgauucuccugucucagc

SEQ ID NO: 36817 - RNA, 20 nt, Artificial Sequence
  spacer sequence TTCN PAM
cuuuagggaccagcuaucga

SEQ ID NO: 36818 - RNA, 20 nt, Artificial Sequence
  spacer sequence TTCN PAM
guguggugguuacaccacgu

SEQ ID NO: 36819 - RNA, 20 nt, Artificial Sequence
  spacer sequence TTCN PAM
uucuguguggugguuacacc

SEQ ID NO: 36820 - RNA, 20 nt, Artificial Sequence
  spacer sequence TTCN PAM
agcuucguucuguguggugg

SEQ ID NO: 36821 - RNA, 20 nt, Artificial Sequence
  spacer sequence TTCN PAM
ugccguccuuagaagcugcc

SEQ ID NO: 36822 - RNA, 20 nt, Artificial Sequence
  spacer sequence TTCN PAM
aaggacggcaggaacguucc

SEQ ID NO: 36823 - RNA, 20 nt, Artificial Sequence
  spacer sequence TTCN PAM
ccuuagcaaaggcagcuucu

SEQ ID NO: 36824 - RNA, 20 nt, Artificial Sequence
  spacer sequence TTCN PAM
cacaccauugauucaucucc

SEQ ID NO: 36825 - RNA, 20 nt, Artificial Sequence
  spacer sequence TTCN PAM
ucuccagacccuugguuuuc

SEQ ID NO: 36826 - RNA, 20 nt, Artificial Sequence
  spacer sequence TTCN PAM
uguugauuuuucaaaaauca

SEQ ID NO: 36827 - RNA, 20 nt, Artificial Sequence
  spacer sequence TTCN PAM
aaaaucaccugauagucuga

SEQ ID NO: 36828 - RNA, 20 nt, Artificial Sequence
  spacer sequence TTCN PAM
gucagacuaucaggugauuu

SEQ ID NO: 36829 - RNA, 20 nt, Artificial Sequence
  spacer sequence TTCN PAM
acuggugugugugugugugu

SEQ ID NO: 36830 - RNA, 20 nt, Artificial Sequence
  spacer sequence TTCN PAM
cuguaaccuccuccucccgg

SEQ ID NO: 36831 - RNA, 20 nt, Artificial Sequence
  spacer sequence TTCN PAM
agagacucgugccucagccu

SEQ ID NO: 36832 - RNA, 20 nt, Artificial Sequence
  spacer sequence TTCN PAM
ccauguuggccaggcugguc

SEQ ID NO: 36833 - RNA, 20 nt, Artificial Sequence
  spacer sequence TTCN PAM
agaccagccuggccaacaug

SEQ ID NO: 36834 - RNA, 20 nt, Artificial Sequence
  spacer sequence TTCN PAM
aggccuggugcgguggcuca

SEQ ID NO: 36835 - RNA, 20 nt, Artificial Sequence
  spacer sequence TTCN PAM
cuuuauaaagguucucccgc

SEQ ID NO: 36836 - RNA, 20 nt, Artificial Sequence
  spacer sequence TTCN PAM
cccgccucucccuucccggc

SEQ ID NO: 36837 - RNA, 20 nt, Artificial Sequence
  spacer sequence TTCN PAM
cggcugccuaauggacgcag

SEQ ID NO: 36838 - RNA, 20 nt, Artificial Sequence
  spacer sequence TTCN PAM
gucccacauccugucugcgu

SEQ ID NO: 36839 - RNA, 20 nt, Artificial Sequence
  spacer sequence TTCN PAM
cgccggugcuucugucccac

SEQ ID NO: 36840 - RNA, 20 nt, Artificial Sequence
  spacer sequence TTCN PAM
cugugcuugcuucccgccgg

SEQ ID NO: 36841 - RNA, 20 nt, Artificial Sequence
  spacer sequence TTCN PAM
cagucauccagucuccauua

SEQ ID NO: 36842 - RNA, 20 nt, Artificial Sequence
  spacer sequence TTCN PAM
ggguucacauccuggcucug

SEQ ID NO: 36843 - RNA, 20 nt, Artificial Sequence
  spacer sequence TTCN PAM
cauccuggcucugcacaugu

SEQ ID NO: 36844 - RNA, 20 nt, Artificial Sequence
  spacer sequence TTCN PAM
agggacauaggugaggccca

SEQ ID NO: 36845 - RNA, 20 nt, Artificial Sequence
  spacer sequence TTCN PAM
ggggagggggaauuacgaga

SEQ ID NO: 36846 - RNA, 20 nt, Artificial Sequence
  spacer sequence TTCN PAM
cccuccccagaaccccacca

SEQ ID NO: 36847 - RNA, 20 nt, Artificial Sequence
  spacer sequence TTCN PAM
uggagcucucguaauucccc

SEQ ID NO: 36848 - RNA, 20 nt, Artificial Sequence
  spacer sequence TTCN PAM
gcaacgccgucugggcgugu

SEQ ID NO: 36849 - RNA, 20 nt, Artificial Sequence
  spacer sequence TTCN PAM
gagacaggcugagggcgguc

SEQ ID NO: 36850 - RNA, 20 nt, Artificial Sequence
  spacer sequence TTCN PAM
cccggcagcagggagcggac

SEQ ID NO: 36851 - RNA, 20 nt, Artificial Sequence
  spacer sequence TTCN PAM
ugcggucuuggucuugcucc

SEQ ID NO: 36852 - RNA, 20 nt, Artificial Sequence
  spacer sequence TTCN PAM
cgcagggaccgccgguggcg

SEQ ID NO: 36853 - RNA, 20 nt, Artificial Sequence
  spacer sequence TTCN PAM
gccuuuauggaggcccccgc

SEQ ID NO: 36854 - RNA, 20 nt, Artificial Sequence
  spacer sequence TTCN PAM
gcuucugccuuuauggaggc

SEQ ID NO: 36855 - RNA, 20 nt, Artificial Sequence
  spacer sequence TTCN PAM
acccuucggcuucugccuuu

SEQ ID NO: 36856 - RNA, 20 nt, Artificial Sequence
  spacer sequence TTCN PAM
gcugcguuuagggcuccuuu

SEQ ID NO: 36857 - RNA, 20 nt, Artificial Sequence
  spacer sequence TTCN PAM
aacuuaagcccgugcuccga

SEQ ID NO: 36858 - RNA, 20 nt, Artificial Sequence
  spacer sequence TTCN PAM
uuccaacuuaagcccgugcu

SEQ ID NO: 36859 - RNA, 20 nt, Artificial Sequence
  spacer sequence TTCN PAM
cugucuuaguuucuuuccaa

SEQ ID NO: 36860 - RNA, 20 nt, Artificial Sequence
  spacer sequence TTCN PAM
accuucgcugucuuaguuuc

SEQ ID NO: 36861 - RNA, 20 nt, Artificial Sequence
  spacer sequence TTCN PAM
ccgcggcggggcccuuccac

SEQ ID NO: 36862 - RNA, 20 nt, Artificial Sequence
  spacer sequence TTCN PAM
gcgcccguguucgccgcggc

SEQ ID NO: 36863 - RNA, 20 nt, Artificial Sequence
  spacer sequence TTCN PAM
ucgcacucgaggugcagcag

SEQ ID NO: 36864 - RNA, 20 nt, Artificial Sequence
  spacer sequence TTCN PAM
uaugcagccuccugacccca

SEQ ID NO: 36865 - RNA, 20 nt, Artificial Sequence
  spacer sequence TTCN PAM
acugaggcuccuccgugcag

SEQ ID NO: 36866 - RNA, 20 nt, Artificial Sequence
  spacer sequence TTCN PAM
acucgcccuugcccgcuuuu

SEQ ID NO: 36867 - RNA, 20 nt, Artificial Sequence
  spacer sequence TTCN PAM
uugccggggagucccgggcg

SEQ ID NO: 36868 - RNA, 20 nt, Artificial Sequence
  spacer sequence TTCN PAM
uggucgacggaggcugcgaa

SEQ ID NO: 36869 - RNA, 20 nt, Artificial Sequence
  spacer sequence TTCN PAM
cagccuccgucgaccaugaa

SEQ ID NO: 36870 - RNA, 20 nt, Artificial Sequence
  spacer sequence TTCN PAM
cuucgcagccuccgucgacc

SEQ ID NO: 36871 - RNA, 20 nt, Artificial Sequence
  spacer sequence TTCN PAM
ggcugggguuucccuucgca

SEQ ID NO: 36872 - RNA, 20 nt, Artificial Sequence
  spacer sequence TTCN PAM
cgccuccgcugcauccuggg

SEQ ID NO: 36873 - RNA, 20 nt, Artificial Sequence
  spacer sequence TTCN PAM
uccugcuguuuuuaaaggga

SEQ ID NO: 36874 - RNA, 20 nt, Artificial Sequence
  spacer sequence TTCN PAM
cgaggaccucaaauccggac

SEQ ID NO: 36875 - RNA, 20 nt, Artificial Sequence
  spacer sequence TTCN PAM
guuuuucuuucuuuuuuggu

SEQ ID NO: 36876 - RNA, 20 nt, Artificial Sequence
  spacer sequence TTCN PAM
uucuuuuuugguuuuguuuu

SEQ ID NO: 36877 - RNA, 20 nt, Artificial Sequence
  spacer sequence TTCN PAM
uuuuugguuuuguuuuggac

SEQ ID NO: 36878 - RNA, 20 nt, Artificial Sequence
  spacer sequence TTCN PAM
aacugcugggguaaagagau

SEQ ID NO: 36879 - RNA, 20 nt, Artificial Sequence
  spacer sequence TTCN PAM
aagcugcacugagcuaugau

SEQ ID NO: 36880 - RNA, 20 nt, Artificial Sequence
  spacer sequence TTCN PAM
caaagcgcugggauugcaga

SEQ ID NO: 36881 - RNA, 20 nt, Artificial Sequence
  spacer sequence TTCN PAM
aggcauacucaucuaauaac

SEQ ID NO: 36882 - RNA, 20 nt, Artificial Sequence
  spacer sequence TTCN PAM
uguccgcaaccuucauugcu

SEQ ID NO: 36883 - RNA, 20 nt, Artificial Sequence
  spacer sequence TTCN PAM
uugcuccaacgacaacuuuu

SEQ ID NO: 36884 - RNA, 20 nt, Artificial Sequence
  spacer sequence TTCN PAM
uccaugauagacggcauccu

SEQ ID NO: 36885 - RNA, 20 nt, Artificial Sequence
  spacer sequence TTCN PAM
agcaacuugguggcccucuc

SEQ ID NO: 36886 - RNA, 20 nt, Artificial Sequence
  spacer sequence TTCN PAM
cuccuugcagccucccugag

SEQ ID NO: 36887 - RNA, 20 nt, Artificial Sequence
  spacer sequence TTCN PAM
guuuacccuccaauccccaa

SEQ ID NO: 36888 - RNA, 20 nt, Artificial Sequence
  spacer sequence TTCN PAM
gcuccugccccugagggcuu

SEQ ID NO: 36889 - RNA, 20 nt, Artificial Sequence
  spacer sequence TTCN PAM
ccugcuaaguggggugaggu

SEQ ID NO: 36890 - RNA, 20 nt, Artificial Sequence
  spacer sequence TTCN PAM
cuugaccucaccccacuuag

SEQ ID NO: 36891 - RNA, 20 nt, Artificial Sequence
  spacer sequence TTCN PAM
uucccuugaccucaccccac

SEQ ID NO: 36892 - RNA, 20 nt, Artificial Sequence
  spacer sequence TTCN PAM
aaagcucccgcccugcuccu

SEQ ID NO: 36893 - RNA, 20 nt, Artificial Sequence
  spacer sequence TTCN PAM
auucuaaagcucccgcccug

SEQ ID NO: 36894 - RNA, 20 nt, Artificial Sequence
  spacer sequence TTCN PAM
agguuccauucuaaagcucc

SEQ ID NO: 36895 - RNA, 20 nt, Artificial Sequence
  spacer sequence TTCN PAM
gccggggcagcaggccagag

SEQ ID NO: 36896 - RNA, 20 nt, Artificial Sequence
  spacer sequence TTCN PAM
caagccuacugccccacagc

SEQ ID NO: 36897 - RNA, 20 nt, Artificial Sequence
  spacer sequence TTCN PAM
cacccuucccaagccuacug

SEQ ID NO: 36898 - RNA, 20 nt, Artificial Sequence
  spacer sequence TTCN PAM
uauucucacccuucccaagc

SEQ ID NO: 36899 - RNA, 20 nt, Artificial Sequence
  spacer sequence TTCN PAM
aggcuaauaucccaguugca

SEQ ID NO: 36900 - RNA, 20 nt, Artificial Sequence
  spacer sequence TTCN PAM
agaccagcuuggcaaauacg

SEQ ID NO: 36901 - RNA, 20 nt, Artificial Sequence
  spacer sequence TTCN PAM
ccugccucagccucccgagu

SEQ ID NO: 36902 - RNA, 20 nt, Artificial Sequence
  spacer sequence TTCN PAM
agcgauucuccugccucagc

SEQ ID NO: 36903 - RNA, 20 nt, Artificial Sequence
  spacer sequence TTCN PAM
cgcucugucacccaggcugg

SEQ ID NO: 36904 - RNA, 20 nt, Artificial Sequence
  spacer sequence TTCN PAM
gugccucaggccuguaaucc

SEQ ID NO: 36905 - RNA, 20 nt, Artificial Sequence
  spacer sequence TTCN PAM
agacaagccuugggcaaccg

SEQ ID NO: 36906 - RNA, 20 nt, Artificial Sequence
  spacer sequence TTCN PAM
uuugguggagacugggucuc

SEQ ID NO: 36907 - RNA, 20 nt, Artificial Sequence
  spacer sequence TTCN PAM
uuuuuuccuuugguggagac

SEQ ID NO: 36908 - RNA, 20 nt, Artificial Sequence
  spacer sequence TTCN PAM
ugcagcugcuguaacgaauu

SEQ ID NO: 36909 - RNA, 20 nt, Artificial Sequence
  spacer sequence TTCN PAM
caaaaucuuuccugcagcug

SEQ ID NO: 36910 - RNA, 20 nt, Artificial Sequence
  spacer sequence TTCN PAM
auuucccaaaaucuuuccug

SEQ ID NO: 36911 - RNA, 20 nt, Artificial Sequence
  spacer sequence TTCN PAM
agggccuggggacagguggg

SEQ ID NO: 36912 - RNA, 20 nt, Artificial Sequence
  spacer sequence TTCN PAM
ugcucugcuguggucuacug

SEQ ID NO: 36913 - RNA, 20 nt, Artificial Sequence
  spacer sequence TTCN PAM
auccagagcugggccauuuc

SEQ ID NO: 36914 - RNA, 20 nt, Artificial Sequence
  spacer sequence TTCN PAM
uucccuuuuggugaacaguu

SEQ ID NO: 36915 - RNA, 20 nt, Artificial Sequence
  spacer sequence TTCN PAM
cuuuuggugaacaguuguga

SEQ ID NO: 36916 - RNA, 20 nt, Artificial Sequence
  spacer sequence TTCN PAM
ccaaaagggaaggaaauggc

SEQ ID NO: 36917 - RNA, 20 nt, Artificial Sequence
  spacer sequence TTCN PAM
caacuguucaccaaaaggga

SEQ ID NO: 36918 - RNA, 20 nt, Artificial Sequence
  spacer sequence TTCN PAM
gagacgcuggaggacgguug

SEQ ID NO: 36919 - RNA, 20 nt, Artificial Sequence
  spacer sequence TTCN PAM
accuuagccuccugaguagc

SEQ ID NO: 36920 - RNA, 20 nt, Artificial Sequence
  spacer sequence TTCN PAM
agccauccuuccaccuuagc

SEQ ID NO: 36921 - RNA, 20 nt, Artificial Sequence
  spacer sequence TTCN PAM
ccauugucacugggugcccu

SEQ ID NO: 36922 - RNA, 20 nt, Artificial Sequence
  spacer sequence TTCN PAM
ccagcuuccccauugucacu

SEQ ID NO: 36923 - RNA, 20 nt, Artificial Sequence
  spacer sequence TTCN PAM
cccagaggaacacacaaggc

SEQ ID NO: 36924 - RNA, 20 nt, Artificial Sequence
  spacer sequence TTCN PAM
ucugggagaacuuccccagc

SEQ ID NO: 36925 - RNA, 20 nt, Artificial Sequence
  spacer sequence TTCN PAM
ccguguuagccaggaugguc

SEQ ID NO: 36926 - RNA, 20 nt, Artificial Sequence
  spacer sequence TTCN PAM
ccugucucagccucccgagu

SEQ ID NO: 36927 - RNA, 20 nt, Artificial Sequence
  spacer sequence TTCN PAM
cgccauucuccugucucagc

SEQ ID NO: 36928 - RNA, 20 nt, Artificial Sequence
  spacer sequence TTCN PAM
accucccagguucacgccau

SEQ ID NO: 36929 - RNA, 20 nt, Artificial Sequence
  spacer sequence TTCN PAM
ccuccuggauucaagugauc

SEQ ID NO: 36930 - RNA, 20 nt, Artificial Sequence
  spacer sequence TTCN PAM
agugauccuccugcuucagu

SEQ ID NO: 36931 - RNA, 20 nt, Artificial Sequence
  spacer sequence TTCN PAM
gucuccugaaguguugggau

SEQ ID NO: 36932 - RNA, 20 nt, Artificial Sequence
  spacer sequence TTCN PAM
ggagacugaagcaggaggau

SEQ ID NO: 36933 - RNA, 20 nt, Artificial Sequence
  spacer sequence TTCN PAM
uucacccugaaucauuuaug

SEQ ID NO: 36934 - RNA, 20 nt, Artificial Sequence
  spacer sequence TTCN PAM
cccugaaucauuuauguagg

SEQ ID NO: 36935 - RNA, 20 nt, Artificial Sequence
  spacer sequence TTCN PAM
gggugaaugaagugacuguu

SEQ ID NO: 36936 - RNA, 20 nt, Artificial Sequence
  spacer sequence TTCN PAM
ucccuuuuuacaaugaaugu

SEQ ID NO: 36937 - RNA, 20 nt, Artificial Sequence
  spacer sequence TTCN PAM
uuauuccucccuuuuuacaa

SEQ ID NO: 36938 - RNA, 20 nt, Artificial Sequence
  spacer sequence TTCN PAM
ucagccugggguacauccug

SEQ ID NO: 36939 - RNA, 20 nt, Artificial Sequence
  spacer sequence TTCN PAM
gccugggguacauccugccg

SEQ ID NO: 36940 - RNA, 20 nt, Artificial Sequence
  spacer sequence TTCN PAM
ccacagcucauccggggcua

SEQ ID NO: 36941 - RNA, 20 nt, Artificial Sequence
  spacer sequence TTCN PAM
ccggggauucacccgugacc

SEQ ID NO: 36942 - RNA, 20 nt, Artificial Sequence
  spacer sequence TTCN PAM
cccgugacccgccacgcccg

SEQ ID NO: 36943 - RNA, 20 nt, Artificial Sequence
  spacer sequence TTCN PAM
cagggagggagggaggcagc

SEQ ID NO: 36944 - RNA, 20 nt, Artificial Sequence
  spacer sequence TTCN PAM
aaagcagaggacacugggug

SEQ ID NO: 36945 - RNA, 20 nt, Artificial Sequence
  spacer sequence TTCN PAM
aggucugcgagcagggagga

SEQ ID NO: 36946 - RNA, 20 nt, Artificial Sequence
  spacer sequence TTCN PAM
auaggaaagucuccguuggg

SEQ ID NO: 36947 - RNA, 20 nt, Artificial Sequence
  spacer sequence TTCN PAM
uauugaaaauuuccaggucu

SEQ ID NO: 36948 - RNA, 20 nt, Artificial Sequence
  spacer sequence TTCN PAM
cacuugcuaaucccccuuuu

SEQ ID NO: 36949 - RNA, 20 nt, Artificial Sequence
  spacer sequence TTCN PAM
guaaggaucaagggaguggg

SEQ ID NO: 36950 - RNA, 20 nt, Artificial Sequence
  spacer sequence TTCN PAM
cucucucgcagggcuucugu

SEQ ID NO: 36951 - RNA, 20 nt, Artificial Sequence
  spacer sequence TTCN PAM
gagaaggauguuucaggguu

SEQ ID NO: 36952 - RNA, 20 nt, Artificial Sequence
  spacer sequence TTCN PAM
cagaaaagguucaugaugga

SEQ ID NO: 36953 - RNA, 20 nt, Artificial Sequence
  spacer sequence TTCN PAM
ggguucauccaggcaggcag

SEQ ID NO: 36954 - RNA, 20 nt, Artificial Sequence
  spacer sequence TTCN PAM
uccaggcaggcagaaggaug

SEQ ID NO: 36955 - RNA, 20 nt, Artificial Sequence
  spacer sequence TTCN PAM
gccugccuggaugaacccug

SEQ ID NO: 36956 - RNA, 20 nt, Artificial Sequence
  spacer sequence TTCN PAM
acaaggugcauccuucugcc

SEQ ID NO: 36957 - RNA, 20 nt, Artificial Sequence
  spacer sequence TTCN PAM
ccugccucagccucccgagu

SEQ ID NO: 36958 - RNA, 20 nt, Artificial Sequence
  spacer sequence TTCN PAM
agcgauucuccugccucagc

SEQ ID NO: 36959 - RNA, 20 nt, Artificial Sequence
  spacer sequence TTCN PAM
gugucuggcgucucucacug

SEQ ID NO: 36960 - RNA, 20 nt, Artificial Sequence
  spacer sequence TTCN PAM
ccugagggcccgggcagggu

SEQ ID NO: 36961 - RNA, 20 nt, Artificial Sequence
  spacer sequence TTCN PAM
caccccagguuaauaggcaa

SEQ ID NO: 36962 - RNA, 20 nt, Artificial Sequence
  spacer sequence TTCN PAM
uuucaauuagcagcaggaau

SEQ ID NO: 36963 - RNA, 20 nt, Artificial Sequence
  spacer sequence TTCN PAM
auuagcagcaggaauguucc

SEQ ID NO: 36964 - RNA, 20 nt, Artificial Sequence
  spacer sequence TTCN PAM
ugcugcuaauugaaaggaaa

SEQ ID NO: 36965 - RNA, 20 nt, Artificial Sequence
  spacer sequence TTCN PAM
cggcgcugggcucggcgccu

SEQ ID NO: 36966 - RNA, 20 nt, Artificial Sequence
  spacer sequence TTCN PAM
ggcuggagcugcccgggcgu

SEQ ID NO: 36967 - RNA, 20 nt, Artificial Sequence
  spacer sequence TTCN PAM
aacaccaacgccccgcaccg

SEQ ID NO: 36968 - RNA, 20 nt, Artificial Sequence
  spacer sequence TTCN PAM
ccaggacacgcaggaugcgc

SEQ ID NO: 36969 - RNA, 20 nt, Artificial Sequence
  spacer sequence TTCN PAM
cugcccgcccgccugacauu

SEQ ID NO: 36970 - RNA, 20 nt, Artificial Sequence
  spacer sequence TTCN PAM
cccgcccuggccggccgggc

SEQ ID NO: 36971 - RNA, 20 nt, Artificial Sequence
  spacer sequence TTCN PAM
cgggccccugggaggcaccg

SEQ ID NO: 36972 - RNA, 20 nt, Artificial Sequence
  spacer sequence TTCN PAM
cggugccucccaggggcccg

SEQ ID NO: 36973 - RNA, 20 nt, Artificial Sequence
  spacer sequence TTCN PAM
uggcaggugacaccuacccu

SEQ ID NO: 36974 - RNA, 20 nt, Artificial Sequence
  spacer sequence TTCN PAM
caggccucagcagggccagg

SEQ ID NO: 36975 - RNA, 20 nt, Artificial Sequence
  spacer sequence TTCN PAM
uggcccugcugaggccugug

SEQ ID NO: 36976 - RNA, 20 nt, Artificial Sequence
  spacer sequence TTCN PAM
cccgacccccaacaucuuau

SEQ ID NO: 36977 - RNA, 20 nt, Artificial Sequence
  spacer sequence TTCN PAM
cgccaggcccugcccgucag

SEQ ID NO: 36978 - RNA, 20 nt, Artificial Sequence
  spacer sequence TTCN PAM
accccagacucgcucuuauc

SEQ ID NO: 36979 - RNA, 20 nt, Artificial Sequence
  spacer sequence TTCN PAM
cugagcccugcuguccguca

SEQ ID NO: 36980 - RNA, 20 nt, Artificial Sequence
  spacer sequence TTCN PAM
gccgccccgcagacggugug

SEQ ID NO: 36981 - RNA, 20 nt, Artificial Sequence
  spacer sequence TTCN PAM
ccuguggggagggccgggug

SEQ ID NO: 36982 - RNA, 20 nt, Artificial Sequence
  spacer sequence TTCN PAM
gcuucuccuguggggagggc

SEQ ID NO: 36983 - RNA, 20 nt, Artificial Sequence
  spacer sequence TTCN PAM
cgaucuccgccugccgcuuc

SEQ ID NO: 36984 - RNA, 20 nt, Artificial Sequence
  spacer sequence TTCN PAM
ggugcugcagcugccuccgc

SEQ ID NO: 36985 - RNA, 20 nt, Artificial Sequence
  spacer sequence TTCN PAM
gcucgucguccugcaucugc

SEQ ID NO: 36986 - RNA, 20 nt, Artificial Sequence
  spacer sequence TTCN PAM
ccauccuguccccuuccugc

SEQ ID NO: 36987 - RNA, 20 nt, Artificial Sequence
  spacer sequence TTCN PAM
ggcgggcgggaggcccaggc

SEQ ID NO: 36988 - RNA, 20 nt, Artificial Sequence
  spacer sequence TTCN PAM
ugcaggaggugccugggcag

SEQ ID NO: 36989 - RNA, 20 nt, Artificial Sequence
  spacer sequence TTCN PAM
ugcaggaggugucugggagc

SEQ ID NO: 36990 - RNA, 20 nt, Artificial Sequence
  spacer sequence TTCN PAM
aauacuuggaaagugacaug

SEQ ID NO: 36991 - RNA, 20 nt, Artificial Sequence
  spacer sequence TTCN PAM
aaguauuagaagagauaacg

SEQ ID NO: 36992 - RNA, 20 nt, Artificial Sequence
  spacer sequence TTCN PAM
aguuucccuggugagauaaa

SEQ ID NO: 36993 - RNA, 20 nt, Artificial Sequence
  spacer sequence TTCN PAM
cuggugagauaaaguuuccu

SEQ ID NO: 36994 - RNA, 20 nt, Artificial Sequence
  spacer sequence TTCN PAM
uguuaaaaugugcaaauuug

SEQ ID NO: 36995 - RNA, 20 nt, Artificial Sequence
  spacer sequence TTCN PAM
cgcucaaauuugcacauuuu

SEQ ID NO: 36996 - RNA, 20 nt, Artificial Sequence
  spacer sequence TTCN PAM
ccaaccuggggagagggugu

SEQ ID NO: 36997 - RNA, 20 nt, Artificial Sequence
  spacer sequence TTCN PAM
uucuccaaccuggggagagg

SEQ ID NO: 36998 - RNA, 20 nt, Artificial Sequence
  spacer sequence TTCN PAM
ccuuggcaguggcuggggcg

SEQ ID NO: 36999 - RNA, 20 nt, Artificial Sequence
  spacer sequence TTCN PAM
ucaccaccucugucuugcgc

SEQ ID NO: 37000 - RNA, 20 nt, Artificial Sequence
  spacer sequence TTCN PAM
cagcagguaagggggugacu

SEQ ID NO: 37001 - RNA, 20 nt, Artificial Sequence
  spacer sequence TTCN PAM
agcaauucuccugccucagc

SEQ ID NO: 37002 - RNA, 20 nt, Artificial Sequence
  spacer sequence TTCN PAM
ccugccucagccucccaagu

SEQ ID NO: 37003 - RNA, 20 nt, Artificial Sequence
  spacer sequence TTCN PAM
uuggcugggcacgguggcuc

SEQ ID NO: 37004 - RNA, 20 nt, Artificial Sequence
  spacer sequence TTCN PAM
aaacccacuuccuuggcugg

SEQ ID NO: 37005 - RNA, 20 nt, Artificial Sequence
  spacer sequence TTCN PAM
accuucaaaacccacuuccu

SEQ ID NO: 37006 - RNA, 20 nt, Artificial Sequence
  spacer sequence TTCN PAM
ccaggugcuuuucccugaag

SEQ ID NO: 37007 - RNA, 20 nt, Artificial Sequence
  spacer sequence TTCN PAM
cugaagguuguuugagcaug

SEQ ID NO: 37008 - RNA, 20 nt, Artificial Sequence
  spacer sequence TTCN PAM
gggaaaagcaccuggagaac

SEQ ID NO: 37009 - RNA, 20 nt, Artificial Sequence
  spacer sequence TTCN PAM
gggacacacuccugucucag

SEQ ID NO: 37010 - RNA, 20 nt, Artificial Sequence
  spacer sequence TTCN PAM
ugcuguuucugggacacacu

SEQ ID NO: 37011 - RNA, 20 nt, Artificial Sequence
  spacer sequence TTCN PAM
gggagaggggccugugugca

SEQ ID NO: 37012 - RNA, 20 nt, Artificial Sequence
  spacer sequence TTCN PAM
gcccugcauggucagacccu

SEQ ID NO: 37013 - RNA, 20 nt, Artificial Sequence
  spacer sequence TTCN PAM
gacaggcgacacuagacccu

SEQ ID NO: 37014 - RNA, 20 nt, Artificial Sequence
  spacer sequence TTCN PAM
ggguggccugcgggagccgc

SEQ ID NO: 37015 - RNA, 20 nt, Artificial Sequence
  spacer sequence TTCN PAM
cucccuccccacauaccccc

SEQ ID NO: 37016 - RNA, 20 nt, Artificial Sequence
  spacer sequence TTCN PAM
ucccucccuccccacauacc

SEQ ID NO: 37017 - RNA, 20 nt, Artificial Sequence
  spacer sequence TTCN PAM
ucuucccggggaugcugacg

SEQ ID NO: 37018 - RNA, 20 nt, Artificial Sequence
  spacer sequence TTCN PAM
cggggaugcugacgccccug

SEQ ID NO: 37019 - RNA, 20 nt, Artificial Sequence
  spacer sequence TTCN PAM
cucuucuuucuugcagacgc

SEQ ID NO: 37020 - RNA, 20 nt, Artificial Sequence
  spacer sequence TTCN PAM
uucuugcagacgccgguggg

SEQ ID NO: 37021 - RNA, 20 nt, Artificial Sequence
  spacer sequence TTCN PAM
ugcagacgccggugggcacg

SEQ ID NO: 37022 - RNA, 20 nt, Artificial Sequence
  spacer sequence TTCN PAM
agagguccuaccuuugggcg

SEQ ID NO: 37023 - RNA, 20 nt, Artificial Sequence
  spacer sequence TTCN PAM
uuccagagguccuaccuuug

SEQ ID NO: 37024 - RNA, 20 nt, Artificial Sequence
  spacer sequence TTCN PAM
cuccccgcccugccaucccc

SEQ ID NO: 37025 - RNA, 20 nt, Artificial Sequence
  spacer sequence TTCN PAM
gacgccagcgucaaucccgg

SEQ ID NO: 37026 - RNA, 20 nt, Artificial Sequence
  spacer sequence TTCN PAM
ggccugguuuguuguguguu

SEQ ID NO: 37027 - RNA, 20 nt, Artificial Sequence
  spacer sequence TTCN PAM
uaaggagagugucuucuugu

SEQ ID NO: 37028 - RNA, 20 nt, Artificial Sequence
  spacer sequence TTCN PAM
ugucuuacuguagaauuaaa

SEQ ID NO: 37029 - RNA, 20 nt, Artificial Sequence
  spacer sequence TTCN PAM
acaguaagacaagaagacac

SEQ ID NO: 37030 - RNA, 20 nt, Artificial Sequence
  spacer sequence TTCN PAM
caaaaucccugagaggccug

SEQ ID NO: 37031 - RNA, 20 nt, Artificial Sequence
  spacer sequence TTCN PAM
ucauccucagcccagugauu

SEQ ID NO: 37032 - RNA, 20 nt, Artificial Sequence
  spacer sequence TTCN PAM
accucccgugcagacaagcg

SEQ ID NO: 37033 - RNA, 20 nt, Artificial Sequence
  spacer sequence TTCN PAM
ucaugggggagccgucaacc

SEQ ID NO: 37034 - RNA, 20 nt, Artificial Sequence
  spacer sequence TTCN PAM
ccgagaagacgggccccacg

SEQ ID NO: 37035 - RNA, 20 nt, Artificial Sequence
  spacer sequence TTCN PAM
cggggaagcgugggccggcg

SEQ ID NO: 37036 - RNA, 20 nt, Artificial Sequence
  spacer sequence TTCN PAM
uuccacccuaaucucacggc

SEQ ID NO: 37037 - RNA, 20 nt, Artificial Sequence
  spacer sequence TTCN PAM
cccggggcagccaguccuac

SEQ ID NO: 37038 - RNA, 20 nt, Artificial Sequence
  spacer sequence TTCN PAM
gagaagcaggggaagguggg

SEQ ID NO: 37039 - RNA, 20 nt, Artificial Sequence
  spacer sequence TTCN PAM
cggaagcgcagcggugcugg

SEQ ID NO: 37040 - RNA, 20 nt, Artificial Sequence
  spacer sequence TTCN PAM
ccugcuucucggaagcgcag

SEQ ID NO: 37041 - RNA, 20 nt, Artificial Sequence
  spacer sequence TTCN PAM
agcccugucccguccugggc

SEQ ID NO: 37042 - RNA, 20 nt, Artificial Sequence
  spacer sequence TTCN PAM
uuccagcccugucccguccu

SEQ ID NO: 37043 - RNA, 20 nt, Artificial Sequence
  spacer sequence TTCN PAM
acucuauagcucugcacagc

SEQ ID NO: 37044 - RNA, 20 nt, Artificial Sequence
  spacer sequence TTCN PAM
cccagaaugccuuucaagcg

SEQ ID NO: 37045 - RNA, 20 nt, Artificial Sequence
  spacer sequence TTCN PAM
gggugaagggacgacuguuu

SEQ ID NO: 37046 - RNA, 20 nt, Artificial Sequence
  spacer sequence TTCN PAM
agcgccugcugcaugccagg

SEQ ID NO: 37047 - RNA, 20 nt, Artificial Sequence
  spacer sequence TTCN PAM
aaugagggccacaaccucua

SEQ ID NO: 37048 - RNA, 20 nt, Artificial Sequence
  spacer sequence TTCN PAM
accguaguagagguuguggc

SEQ ID NO: 37049 - RNA, 20 nt, Artificial Sequence
  spacer sequence TTCN PAM
uccagcucaacguccuuggc

SEQ ID NO: 37050 - RNA, 20 nt, Artificial Sequence
  spacer sequence TTCN PAM
ccuuccuccagcucaacguc

SEQ ID NO: 37051 - RNA, 20 nt, Artificial Sequence
  spacer sequence TTCN PAM
aauucuccuuccuccagcuc

SEQ ID NO: 37052 - RNA, 20 nt, Artificial Sequence
  spacer sequence TTCN PAM
acguaagaggugacgucuga

SEQ ID NO: 37053 - RNA, 20 nt, Artificial Sequence
  spacer sequence TTCN PAM
uccagauagcugcgugccuu

SEQ ID NO: 37054 - RNA, 20 nt, Artificial Sequence
  spacer sequence TTCN PAM
ccagauagcugcgugccuug

SEQ ID NO: 37055 - RNA, 20 nt, Artificial Sequence
  spacer sequence TTCN PAM
aggcagagggcacggccagu

SEQ ID NO: 37056 - RNA, 20 nt, Artificial Sequence
  spacer sequence TTCN PAM
uccaacaccccaggcgcagu

SEQ ID NO: 37057 - RNA, 20 nt, Artificial Sequence
  spacer sequence TTCN PAM
cgggagggaggcaggaacca

SEQ ID NO: 37058 - RNA, 20 nt, Artificial Sequence
  spacer sequence TTCN PAM
ugccucccucccgggaaaag

SEQ ID NO: 37059 - RNA, 20 nt, Artificial Sequence
  spacer sequence TTCN PAM
cccugcagucaccagagggc

SEQ ID NO: 37060 - RNA, 20 nt, Artificial Sequence
  spacer sequence TTCN PAM
uuauguucugaagguggagc

SEQ ID NO: 37061 - RNA, 20 nt, Artificial Sequence
  spacer sequence TTCN PAM
gaagguggagcccccagggu

SEQ ID NO: 37062 - RNA, 20 nt, Artificial Sequence
  spacer sequence TTCN PAM
gaacauaaggaaccgcccac

SEQ ID NO: 37063 - RNA, 20 nt, Artificial Sequence
  spacer sequence TTCN PAM
ccucaaacccugggggcucc

SEQ ID NO: 37064 - RNA, 20 nt, Artificial Sequence
  spacer sequence TTCN PAM
agaccagccugagcaacaug

SEQ ID NO: 37065 - RNA, 20 nt, Artificial Sequence
  spacer sequence TTCN PAM
ccauguugcucaggcugguc

SEQ ID NO: 37066 - RNA, 20 nt, Artificial Sequence
  spacer sequence TTCN PAM
auuuuuuaguagagacgggg

SEQ ID NO: 37067 - RNA, 20 nt, Artificial Sequence
  spacer sequence TTCN PAM
ccguguuagccaagaugguc

SEQ ID NO: 37068 - RNA, 20 nt, Artificial Sequence
  spacer sequence TTCN PAM
ccugccuaaggcucccgagc

SEQ ID NO: 37069 - RNA, 20 nt, Artificial Sequence
  spacer sequence TTCN PAM
accgauucuccugccuaagg

SEQ ID NO: 37070 - RNA, 20 nt, Artificial Sequence
  spacer sequence TTCN PAM
cacccguugggggcagcuca

SEQ ID NO: 37071 - RNA, 20 nt, Artificial Sequence
  spacer sequence TTCN PAM
cuccucccacccaaccucga

SEQ ID NO: 37072 - RNA, 20 nt, Artificial Sequence
  spacer sequence TTCN PAM
gaggggccaucgguccccau

SEQ ID NO: 37073 - RNA, 20 nt, Artificial Sequence
  spacer sequence TTCN PAM
caaugccuggcacacccccc

SEQ ID NO: 37074 - RNA, 20 nt, Artificial Sequence
  spacer sequence TTCN PAM
gcucccgcugcggggcgggg

SEQ ID NO: 37075 - RNA, 20 nt, Artificial Sequence
  spacer sequence TTCN PAM
agcaggccuggggguggcgg

SEQ ID NO: 37076 - RNA, 20 nt, Artificial Sequence
  spacer sequence TTCN PAM
gcaggaaugauuuuuacaga

SEQ ID NO: 37077 - RNA, 20 nt, Artificial Sequence
  spacer sequence TTCN PAM
ugcagaaaccacacagagcc

SEQ ID NO: 37078 - RNA, 20 nt, Artificial Sequence
  spacer sequence TTCN PAM
acuaucucaggaggguuccu

SEQ ID NO: 37079 - RNA, 20 nt, Artificial Sequence
  spacer sequence TTCN PAM
uucauucugagucuaaauag

SEQ ID NO: 37080 - RNA, 20 nt, Artificial Sequence
  spacer sequence TTCN PAM
uucugagucuaaauagauga

SEQ ID NO: 37081 - RNA, 20 nt, Artificial Sequence
  spacer sequence TTCN PAM
gagucuaaauagaugacggc

SEQ ID NO: 37082 - RNA, 20 nt, Artificial Sequence
  spacer sequence TTCN PAM
agccaacgguuggacacgcc

SEQ ID NO: 37083 - RNA, 20 nt, Artificial Sequence
  spacer sequence TTCN PAM
ccugcuccucugagaaacca

SEQ ID NO: 37084 - RNA, 20 nt, Artificial Sequence
  spacer sequence TTCN PAM
cagaggagcaggugaauccc

SEQ ID NO: 37085 - RNA, 20 nt, Artificial Sequence
  spacer sequence TTCN PAM
ugguuucucagaggagcagg

SEQ ID NO: 37086 - RNA, 20 nt, Artificial Sequence
  spacer sequence TTCN PAM
aaaaaagauaaauaaauuag

SEQ ID NO: 37087 - RNA, 20 nt, Artificial Sequence
  spacer sequence TTCN PAM
cccaccucagccucccaagu

SEQ ID NO: 37088 - RNA, 20 nt, Artificial Sequence
  spacer sequence TTCN PAM
uggcucaccccauucuccca

SEQ ID NO: 37089 - RNA, 20 nt, Artificial Sequence
  spacer sequence TTCN PAM
cuauguuggucaggcugguc

SEQ ID NO: 37090 - RNA, 20 nt, Artificial Sequence
  spacer sequence TTCN PAM
acguagcugggacuacaggc

SEQ ID NO: 37091 - RNA, 20 nt, Artificial Sequence
  spacer sequence TTCN PAM
ccugccucagccuuccacgu

SEQ ID NO: 37092 - RNA, 20 nt, Artificial Sequence
  spacer sequence TTCN PAM
agcgauucuccugccucagc

SEQ ID NO: 37093 - RNA, 20 nt, Artificial Sequence
  spacer sequence TTCN PAM
cggaucuuuuuaauuuuuuu

SEQ ID NO: 37094 - RNA, 20 nt, Artificial Sequence
  spacer sequence TTCN PAM
uuguucccggaucuuuuuaa

SEQ ID NO: 37095 - RNA, 20 nt, Artificial Sequence
  spacer sequence TTCN PAM
agaugggcugggcuggaacc

SEQ ID NO: 37096 - RNA, 20 nt, Artificial Sequence
  spacer sequence TTCN PAM
agcccagcccaucuggaaag

SEQ ID NO: 37097 - RNA, 20 nt, Artificial Sequence
  spacer sequence TTCN PAM
ccaccaaacuauugucuguc

SEQ ID NO: 37098 - RNA, 20 nt, Artificial Sequence
  spacer sequence TTCN PAM
gacuggucgucuccaggcac

SEQ ID NO: 37099 - RNA, 20 nt, Artificial Sequence
  spacer sequence TTCN PAM
cgacgcggcccuccccaacu

SEQ ID NO: 37100 - RNA, 20 nt, Artificial Sequence
  spacer sequence TTCN PAM
ccacagugaucucaaccgag

SEQ ID NO: 37101 - RNA, 20 nt, Artificial Sequence
  spacer sequence TTCN PAM
gggcucuggcccagguggag

SEQ ID NO: 37102 - RNA, 20 nt, Artificial Sequence
  spacer sequence TTCN PAM
ggggcagacgccagacccac

SEQ ID NO: 37103 - RNA, 20 nt, Artificial Sequence
  spacer sequence TTCN PAM
augugaagcagaugacgcug

SEQ ID NO: 37104 - RNA, 20 nt, Artificial Sequence
  spacer sequence TTCN PAM
caucgaaucgggguccugau

SEQ ID NO: 37105 - RNA, 20 nt, Artificial Sequence
  spacer sequence TTCN PAM
ggccagggccucacccccug

SEQ ID NO: 37106 - RNA, 20 nt, Artificial Sequence
  spacer sequence TTCN PAM
gcccugggcucacugcccaa

SEQ ID NO: 37107 - RNA, 20 nt, Artificial Sequence
  spacer sequence TTCN PAM
uccacuccagaaagcugccu

SEQ ID NO: 37108 - RNA, 20 nt, Artificial Sequence
  spacer sequence TTCN PAM
ggaguggaugaaugauuggg

SEQ ID NO: 37109 - RNA, 20 nt, Artificial Sequence
  spacer sequence TTCN PAM
ggcagcuuucuggaguggau

SEQ ID NO: 37110 - RNA, 20 nt, Artificial Sequence
  spacer sequence TTCN PAM
cuccagagcccagcugggua

SEQ ID NO: 37111 - RNA, 20 nt, Artificial Sequence
  spacer sequence TTCN PAM
gcuucuguccuugccgggug

SEQ ID NO: 37112 - RNA, 20 nt, Artificial Sequence
  spacer sequence TTCN PAM
guccuugccggguggcaaac

SEQ ID NO: 37113 - RNA, 20 nt, Artificial Sequence
  spacer sequence TTCN PAM
aucuggagcuccuaaauaau

SEQ ID NO: 37114 - RNA, 20 nt, Artificial Sequence
  spacer sequence TTCN PAM
uuuaaauaauuacugcuagc

SEQ ID NO: 37115 - RNA, 20 nt, Artificial Sequence
  spacer sequence TTCN PAM
gggcucaagcgauccuccuc

SEQ ID NO: 37116 - RNA, 20 nt, Artificial Sequence
  spacer sequence TTCN PAM
uaagagacagggucucacuc

SEQ ID NO: 37117 - RNA, 20 nt, Artificial Sequence
  spacer sequence TTCN PAM
uuauuauuauuuuuuauucu

SEQ ID NO: 37118 - RNA, 20 nt, Artificial Sequence
  spacer sequence TTCN PAM
gucacgcuagcaauucuuua

SEQ ID NO: 37119 - RNA, 20 nt, Artificial Sequence
  spacer sequence TTCN PAM
guggcuucugucacgcuagc

SEQ ID NO: 37120 - RNA, 20 nt, Artificial Sequence
  spacer sequence TTCN PAM
cacagcccccuggaugugca

SEQ ID NO: 37121 - RNA, 20 nt, Artificial Sequence
  spacer sequence TTCN PAM
cagaggaggcaagcaggggc

SEQ ID NO: 37122 - RNA, 20 nt, Artificial Sequence
  spacer sequence TTCN PAM
caugcacugcgugucucuga

SEQ ID NO: 37123 - RNA, 20 nt, Artificial Sequence
  spacer sequence TTCN PAM
cccucaccccugcagcccgu

SEQ ID NO: 37124 - RNA, 20 nt, Artificial Sequence
  spacer sequence TTCN PAM
ccucccugcgugagcccagc

SEQ ID NO: 37125 - RNA, 20 nt, Artificial Sequence
  spacer sequence TTCN PAM
caaagcccucaggacacggc

SEQ ID NO: 37126 - RNA, 20 nt, Artificial Sequence
  spacer sequence TTCN PAM
cuccuccuccuggggucccu

SEQ ID NO: 37127 - RNA, 20 nt, Artificial Sequence
  spacer sequence TTCN PAM
guguggagcuucccuccucc

SEQ ID NO: 37128 - RNA, 20 nt, Artificial Sequence
  spacer sequence TTCN PAM
uuuucuuuuuauuuauuuac

SEQ ID NO: 37129 - RNA, 20 nt, Artificial Sequence
  spacer sequence TTCN PAM
uuuuauuuauuuacuuucug

SEQ ID NO: 37130 - RNA, 20 nt, Artificial Sequence
  spacer sequence TTCN PAM
gaagaaagaguuucacucug

SEQ ID NO: 37131 - RNA, 20 nt, Artificial Sequence
  spacer sequence TTCN PAM
gaaaguaaauaaauaaaaag

SEQ ID NO: 37132 - RNA, 20 nt, Artificial Sequence
  spacer sequence TTCN PAM
ucagaaaguaaauaaauaaa

SEQ ID NO: 37133 - RNA, 20 nt, Artificial Sequence
  spacer sequence TTCN PAM
cucugucgcccggcccgcag

SEQ ID NO: 37134 - RNA, 20 nt, Artificial Sequence
  spacer sequence TTCN PAM
ggaggccgaggcaggaggau

SEQ ID NO: 37135 - RNA, 20 nt, Artificial Sequence
  spacer sequence TTCN PAM
uuuaugagauauaauucgca

SEQ ID NO: 37136 - RNA, 20 nt, Artificial Sequence
  spacer sequence TTCN PAM
cagaccauaaaauuccgccu

SEQ ID NO: 37137 - RNA, 20 nt, Artificial Sequence
  spacer sequence TTCN PAM
gccuuaaugggaggcucauc

SEQ ID NO: 37138 - RNA, 20 nt, Artificial Sequence
  spacer sequence TTCN PAM
uguuuuugagacagggucuu

SEQ ID NO: 37139 - RNA, 20 nt, Artificial Sequence
  spacer sequence TTCN PAM
cuccucuuucuuguuuuuga

SEQ ID NO: 37140 - RNA, 20 nt, Artificial Sequence
  spacer sequence TTCN PAM
uguccccuccccagucagcg

SEQ ID NO: 37141 - RNA, 20 nt, Artificial Sequence
  spacer sequence TTCN PAM
uagaaaugagaucacacggc

SEQ ID NO: 37142 - RNA, 20 nt, Artificial Sequence
  spacer sequence TTCN PAM
augaaauguccaggacaggc

SEQ ID NO: 37143 - RNA, 20 nt, Artificial Sequence
  spacer sequence TTCN PAM
agaccagccuggccaacaug

SEQ ID NO: 37144 - RNA, 20 nt, Artificial Sequence
  spacer sequence TTCN PAM
ccauguuggccaggcugguc

SEQ ID NO: 37145 - RNA, 20 nt, Artificial Sequence
  spacer sequence TTCN PAM
gccuccaaaguaucugggau

SEQ ID NO: 37146 - RNA, 20 nt, Artificial Sequence
  spacer sequence TTCN PAM
ccugcuucagccuccaaagu

SEQ ID NO: 37147 - RNA, 20 nt, Artificial Sequence
  spacer sequence TTCN PAM
agugauucuccugcuucagc

SEQ ID NO: 37148 - RNA, 20 nt, Artificial Sequence
  spacer sequence TTCN PAM
cucuugucgcacaggcugga

SEQ ID NO: 37149 - RNA, 20 nt, Artificial Sequence
  spacer sequence TTCN PAM
uuuuuuuuuuuuugagacag

SEQ ID NO: 37150 - RNA, 20 nt, Artificial Sequence
  spacer sequence TTCN PAM
uucuuuuuuuuuuuuuugag

SEQ ID NO: 37151 - RNA, 20 nt, Artificial Sequence
  spacer sequence TTCN PAM
cuuuucuuucuuuuuuuuuu

SEQ ID NO: 37152 - RNA, 20 nt, Artificial Sequence
  spacer sequence TTCN PAM
gugucuggcgucucucacug

SEQ ID NO: 37153 - RNA, 20 nt, Artificial Sequence
  spacer sequence TTCN PAM
uggcugaauacuauuccacg

SEQ ID NO: 37154 - RNA, 20 nt, Artificial Sequence
  spacer sequence TTCN PAM
gccaugaaaaggagucaggc

SEQ ID NO: 37155 - RNA, 20 nt, Artificial Sequence
  spacer sequence TTCN PAM
acggguugggugggccaugg

SEQ ID NO: 37156 - RNA, 20 nt, Artificial Sequence
  spacer sequence TTCN PAM
uccaucuguagacaguuggg

SEQ ID NO: 37157 - RNA, 20 nt, Artificial Sequence
  spacer sequence TTCN PAM
aucuguagacaguugggcug

SEQ ID NO: 37158 - RNA, 20 nt, Artificial Sequence
  spacer sequence TTCN PAM
acccuuuggcugcagugagu

SEQ ID NO: 37159 - RNA, 20 nt, Artificial Sequence
  spacer sequence TTCN PAM
ccagcaugcuacucacugca

SEQ ID NO: 37160 - RNA, 20 nt, Artificial Sequence
  spacer sequence TTCN PAM
cgccccugcuuucgaggccu

SEQ ID NO: 37161 - RNA, 20 nt, Artificial Sequence
  spacer sequence TTCN PAM
aggccuuuggguguacacgu

SEQ ID NO: 37162 - RNA, 20 nt, Artificial Sequence
  spacer sequence TTCN PAM
cuccuacguguacacccaaa

SEQ ID NO: 37163 - RNA, 20 nt, Artificial Sequence
  spacer sequence TTCN PAM
acggaggcugcaccgucccg

SEQ ID NO: 37164 - RNA, 20 nt, Artificial Sequence
  spacer sequence TTCN PAM
cacaggucguggaugagggc

SEQ ID NO: 37165 - RNA, 20 nt, Artificial Sequence
  spacer sequence TTCN PAM
ccacguccucaccagcgcuc

SEQ ID NO: 37166 - RNA, 20 nt, Artificial Sequence
  spacer sequence TTCN PAM
cguggcuguccugguggcgu

SEQ ID NO: 37167 - RNA, 20 nt, Artificial Sequence
  spacer sequence TTCN PAM
caaagccuucuguucucaga

SEQ ID NO: 37168 - RNA, 20 nt, Artificial Sequence
  spacer sequence TTCN PAM
guucucagaggcagcuuggc

SEQ ID NO: 37169 - RNA, 20 nt, Artificial Sequence
  spacer sequence TTCN PAM
cagaggcagcuuggccucug

SEQ ID NO: 37170 - RNA, 20 nt, Artificial Sequence
  spacer sequence TTCN PAM
cagggccacacagcugggga

SEQ ID NO: 37171 - RNA, 20 nt, Artificial Sequence
  spacer sequence TTCN PAM
ggaugagguccucaccccca

SEQ ID NO: 37172 - RNA, 20 nt, Artificial Sequence
  spacer sequence TTCN PAM
agaccugccaggcuggacac

SEQ ID NO: 37173 - RNA, 20 nt, Artificial Sequence
  spacer sequence TTCN PAM
auggcagccgagggcuccaa

SEQ ID NO: 37174 - RNA, 20 nt, Artificial Sequence
  spacer sequence TTCN PAM
ugucuuggggcagcggccag

SEQ ID NO: 37175 - RNA, 20 nt, Artificial Sequence
  spacer sequence TTCN PAM
guuccgccugauccagacac

SEQ ID NO: 37176 - RNA, 20 nt, Artificial Sequence
  spacer sequence TTCN PAM
gccugauccagacacacccc

SEQ ID NO: 37177 - RNA, 20 nt, Artificial Sequence
  spacer sequence TTCN PAM
aggcaucucaaugacuuugg

SEQ ID NO: 37178 - RNA, 20 nt, Artificial Sequence
  spacer sequence TTCN PAM
aagcccccagggaggggagu

SEQ ID NO: 37179 - RNA, 20 nt, Artificial Sequence
  spacer sequence TTCN PAM
guuucuaagcccccagggag

SEQ ID NO: 37180 - RNA, 20 nt, Artificial Sequence
  spacer sequence TTCN PAM
ccacuuucaguuucuaagcc

SEQ ID NO: 37181 - RNA, 20 nt, Artificial Sequence
  spacer sequence TTCN PAM
uucuggucuguagccaggaa

SEQ ID NO: 37182 - RNA, 20 nt, Artificial Sequence
  spacer sequence TTCN PAM
ggucuguagccaggaacagg

SEQ ID NO: 37183 - RNA, 20 nt, Artificial Sequence
  spacer sequence TTCN PAM
uggcuacagaccagaaggaa

SEQ ID NO: 37184 - RNA, 20 nt, Artificial Sequence
  spacer sequence TTCN PAM
agaaggaauuugcagggcug

SEQ ID NO: 37185 - RNA, 20 nt, Artificial Sequence
  spacer sequence TTCN PAM
agaaacacggcugccugggc

SEQ ID NO: 37186 - RNA, 20 nt, Artificial Sequence
  spacer sequence TTCN PAM
uucuagaaacacggcugccu

SEQ ID NO: 37187 - RNA, 20 nt, Artificial Sequence
  spacer sequence TTCN PAM
gcaccccacggcucccugcu

SEQ ID NO: 37188 - RNA, 20 nt, Artificial Sequence
  spacer sequence TTCN PAM
ugagguguguuggacucucc

SEQ ID NO: 37189 - RNA, 20 nt, Artificial Sequence
  spacer sequence TTCN PAM
uuaucugugugucucugacu

SEQ ID NO: 37190 - RNA, 20 nt, Artificial Sequence
  spacer sequence TTCN PAM
aaauuuccuuaucugugugu

SEQ ID NO: 37191 - RNA, 20 nt, Artificial Sequence
  spacer sequence TTCN PAM
caagucuuuccaaauuuccu

SEQ ID NO: 37192 - RNA, 20 nt, Artificial Sequence
  spacer sequence TTCN PAM
ccacuggguagcauuuuaua

SEQ ID NO: 37193 - RNA, 20 nt, Artificial Sequence
  spacer sequence TTCN PAM
uuucaaacacagaacauugu

SEQ ID NO: 37194 - RNA, 20 nt, Artificial Sequence
  spacer sequence TTCN PAM
aacacagaacauugucagaa

SEQ ID NO: 37195 - RNA, 20 nt, Artificial Sequence
  spacer sequence TTCN PAM
guguuugaaaagaaugugua

SEQ ID NO: 37196 - RNA, 20 nt, Artificial Sequence
  spacer sequence TTCN PAM
gacaauguucuguguuugaa

SEQ ID NO: 37197 - RNA, 20 nt, Artificial Sequence
  spacer sequence TTCN PAM
gcucuguguuccucuccucc

SEQ ID NO: 37198 - RNA, 20 nt, Artificial Sequence
  spacer sequence TTCN PAM
ucuccucccugaaauuuaaa

SEQ ID NO: 37199 - RNA, 20 nt, Artificial Sequence
  spacer sequence TTCN PAM
gggaggagaggaacacagag

SEQ ID NO: 37200 - RNA, 20 nt, Artificial Sequence
  spacer sequence TTCN PAM
uguggcaaucaaucaaacua

SEQ ID NO: 37201 - RNA, 20 nt, Artificial Sequence
  spacer sequence TTCN PAM
uaguuugauugauugccaca

SEQ ID NO: 37202 - RNA, 20 nt, Artificial Sequence
  spacer sequence TTCN PAM
aguguaaauaguuuuuaauu

SEQ ID NO: 37203 - RNA, 20 nt, Artificial Sequence
  spacer sequence TTCN PAM
uuuucaaguguaaauaguuu

SEQ ID NO: 37204 - RNA, 20 nt, Artificial Sequence
  spacer sequence TTCN PAM
uguagucccagcuacucagg

SEQ ID NO: 37205 - RNA, 20 nt, Artificial Sequence
  spacer sequence TTCN PAM
ccugccucagccuccugagu

SEQ ID NO: 37206 - RNA, 20 nt, Artificial Sequence
  spacer sequence TTCN PAM
agcgauucuccugccucagc

SEQ ID NO: 37207 - RNA, 20 nt, Artificial Sequence
  spacer sequence TTCN PAM
cucugucucuccuuguacag

SEQ ID NO: 37208 - RNA, 20 nt, Artificial Sequence
  spacer sequence TTCN PAM
cggcggugccguccacagca

SEQ ID NO: 37209 - RNA, 20 nt, Artificial Sequence
  spacer sequence TTCN PAM
uccaccucggaggagcucag

SEQ ID NO: 37210 - RNA, 20 nt, Artificial Sequence
  spacer sequence TTCN PAM
uggguuaccagaacguggag

SEQ ID NO: 37211 - RNA, 20 nt, Artificial Sequence
  spacer sequence TTCN PAM
gguaacccaugaagaucauu

SEQ ID NO: 37212 - RNA, 20 nt, Artificial Sequence
  spacer sequence TTCN PAM
uggucucggccucauccucc

SEQ ID NO: 37213 - RNA, 20 nt, Artificial Sequence
  spacer sequence TTCN PAM
agauaccaucacggcggagc

SEQ ID NO: 37214 - RNA, 20 nt, Artificial Sequence
  spacer sequence TTCN PAM
augaccaccagcuccgccgu

SEQ ID NO: 37215 - RNA, 20 nt, Artificial Sequence
  spacer sequence TTCN PAM
cuggaggcggccuccguggg

SEQ ID NO: 37216 - RNA, 20 nt, Artificial Sequence
  spacer sequence TTCN PAM
cuucccuggaggcggccucc

SEQ ID NO: 37217 - RNA, 20 nt, Artificial Sequence
  spacer sequence TTCN PAM
ugucgagguccugggggucg

SEQ ID NO: 37218 - RNA, 20 nt, Artificial Sequence
  spacer sequence TTCN PAM
ucaugucgagguccuggggg

SEQ ID NO: 37219 - RNA, 20 nt, Artificial Sequence
  spacer sequence TTCN PAM
uuccgaguuuucuuucgcug

SEQ ID NO: 37220 - RNA, 20 nt, Artificial Sequence
  spacer sequence TTCN PAM
gaguuuucuuucgcuggaaa

SEQ ID NO: 37221 - RNA, 20 nt, Artificial Sequence
  spacer sequence TTCN PAM
uucgcuggaaagagggacag

SEQ ID NO: 37222 - RNA, 20 nt, Artificial Sequence
  spacer sequence TTCN PAM
cuggaaagagggacaggggc

SEQ ID NO: 37223 - RNA, 20 nt, Artificial Sequence
  spacer sequence TTCN PAM
agcgaaagaaaacucggaag

SEQ ID NO: 37224 - RNA, 20 nt, Artificial Sequence
  spacer sequence TTCN PAM
cgagacaaggaccccccaug

SEQ ID NO: 37225 - RNA, 20 nt, Artificial Sequence
  spacer sequence TTCN PAM
cagacgcggcucgcgcccac

SEQ ID NO: 37226 - RNA, 20 nt, Artificial Sequence
  spacer sequence TTCN PAM
cugaggggacaccccgccag

SEQ ID NO: 37227 - RNA, 20 nt, Artificial Sequence
  spacer sequence TTCN PAM
agggccugagcaggccucag

SEQ ID NO: 37228 - RNA, 20 nt, Artificial Sequence
  spacer sequence TTCN PAM
cuggccaaggcgcuggcccc

SEQ ID NO: 37229 - RNA, 20 nt, Artificial Sequence
  spacer sequence TTCN PAM
cccucccccagacuccauug

SEQ ID NO: 37230 - RNA, 20 nt, Artificial Sequence
  spacer sequence TTCN PAM
agacggggcgaaccaggggu

SEQ ID NO: 37231 - RNA, 20 nt, Artificial Sequence
  spacer sequence TTCN PAM
ccccgucuagaagauagccc

SEQ ID NO: 37232 - RNA, 20 nt, Artificial Sequence
  spacer sequence TTCN PAM
uccuggugcuaauuugggga

SEQ ID NO: 37233 - RNA, 20 nt, Artificial Sequence
  spacer sequence TTCN PAM
ccauccugcuuggaccaggg

SEQ ID NO: 37234 - RNA, 20 nt, Artificial Sequence
  spacer sequence TTCN PAM
caaccauaccccgagaucag

SEQ ID NO: 37235 - RNA, 20 nt, Artificial Sequence
  spacer sequence TTCN PAM
ugucccaggcugugucccuc

SEQ ID NO: 37236 - RNA, 20 nt, Artificial Sequence
  spacer sequence TTCN PAM
aaugagagggggcugggggc

SEQ ID NO: 37237 - RNA, 20 nt, Artificial Sequence
  spacer sequence TTCN PAM
cuccugggggcagcuacacu

SEQ ID NO: 37238 - RNA, 20 nt, Artificial Sequence
  spacer sequence TTCN PAM
ugcacauucucacagacacc

SEQ ID NO: 37239 - RNA, 20 nt, Artificial Sequence
  spacer sequence TTCN PAM
cacagacaccgucucacacg

SEQ ID NO: 37240 - RNA, 20 nt, Artificial Sequence
  spacer sequence TTCN PAM
acggcugacgcccaggucac

SEQ ID NO: 37241 - RNA, 20 nt, Artificial Sequence
  spacer sequence TTCN PAM
cugaagugcccuugcuauaa

SEQ ID NO: 37242 - RNA, 20 nt, Artificial Sequence
  spacer sequence TTCN PAM
gcgaaggcucgcggcucgag

SEQ ID NO: 37243 - RNA, 20 nt, Artificial Sequence
  spacer sequence TTCN PAM
ggugugugacgaggcccccg

SEQ ID NO: 37244 - RNA, 20 nt, Artificial Sequence
  spacer sequence TTCN PAM
ugauuuucccagagaagcaa

SEQ ID NO: 37245 - RNA, 20 nt, Artificial Sequence
  spacer sequence TTCN PAM
cagagaagcaaauaaacagc

SEQ ID NO: 37246 - RNA, 20 nt, Artificial Sequence
  spacer sequence TTCN PAM
cugggaaaaucaagaacauc

SEQ ID NO: 37247 - RNA, 20 nt, Artificial Sequence
  spacer sequence TTCN PAM
cgcuguuuauuugcuucucu

SEQ ID NO: 37248 - RNA, 20 nt, Artificial Sequence
  spacer sequence TTCN PAM
uggaguucuugccuuucaac

SEQ ID NO: 37249 - RNA, 20 nt, Artificial Sequence
  spacer sequence TTCN PAM
ugccuuucaaccuggcgagg

SEQ ID NO: 37250 - RNA, 20 nt, Artificial Sequence
  spacer sequence TTCN PAM
accuggcgaggaaggcgugg

SEQ ID NO: 37251 - RNA, 20 nt, Artificial Sequence
  spacer sequence TTCN PAM
ucgccagguugaaaggcaag

SEQ ID NO: 37252 - RNA, 20 nt, Artificial Sequence
  spacer sequence TTCN PAM
ccugccugcacccgcucacc

SEQ ID NO: 37253 - RNA, 20 nt, Artificial Sequence
  spacer sequence TTCN PAM
agcgccucccaccaccccaa

SEQ ID NO: 37254 - RNA, 20 nt, Artificial Sequence
  spacer sequence TTCN PAM
cggggggcccucggguucug

SEQ ID NO: 37255 - RNA, 20 nt, Artificial Sequence
  spacer sequence TTCN PAM
gcggccgccccguccugucc

SEQ ID NO: 37256 - RNA, 20 nt, Artificial Sequence
  spacer sequence TTCN PAM
ucccuuugcugggcucacag

SEQ ID NO: 37257 - RNA, 20 nt, Artificial Sequence
  spacer sequence TTCN PAM
cuacagagcuuguggguguc

SEQ ID NO: 37258 - RNA, 20 nt, Artificial Sequence
  spacer sequence TTCN PAM
caggggccggcuucucuaca

SEQ ID NO: 37259 - RNA, 20 nt, Artificial Sequence
  spacer sequence TTCN PAM
cgugagcaugacacuggucu

SEQ ID NO: 37260 - RNA, 20 nt, Artificial Sequence
  spacer sequence TTCN PAM
ccaagacuacagcgugagag

SEQ ID NO: 37261 - RNA, 20 nt, Artificial Sequence
  spacer sequence TTCN PAM
caucuguaaaauaagccuuc

SEQ ID NO: 37262 - RNA, 20 nt, Artificial Sequence
  spacer sequence TTCN PAM
uggccgggcacgguguuuca

SEQ ID NO: 37263 - RNA, 20 nt, Artificial Sequence
  spacer sequence TTCN PAM
caccugcaauccuaguacuu

SEQ ID NO: 37264 - RNA, 20 nt, Artificial Sequence
  spacer sequence TTCN PAM
guauguuggccaggauggua

SEQ ID NO: 37265 - RNA, 20 nt, Artificial Sequence
  spacer sequence TTCN PAM
ggaggcugaggcaggagaau

SEQ ID NO: 37266 - RNA, 20 nt, Artificial Sequence
  spacer sequence TTCN PAM
ccugccucagccuccugaau

SEQ ID NO: 37267 - RNA, 20 nt, Artificial Sequence
  spacer sequence TTCN PAM
agcgauucuccugccucagc

SEQ ID NO: 37268 - RNA, 20 nt, Artificial Sequence
  spacer sequence TTCN PAM
gagcccugagugggaggcca

SEQ ID NO: 37269 - RNA, 20 nt, Artificial Sequence
  spacer sequence TTCN PAM
ccgaugagguggugagugug

SEQ ID NO: 37270 - RNA, 20 nt, Artificial Sequence
  spacer sequence TTCN PAM
cucagcagugcucuccacca

SEQ ID NO: 37271 - RNA, 20 nt, Artificial Sequence
  spacer sequence TTCN PAM
aauuccagccuaaacccccg

SEQ ID NO: 37272 - RNA, 20 nt, Artificial Sequence
  spacer sequence TTCN PAM
agccuaaacccccgccauuc

SEQ ID NO: 37273 - RNA, 20 nt, Artificial Sequence
  spacer sequence TTCN PAM
ugaggcgcgauuuuaagcuu

SEQ ID NO: 37274 - RNA, 20 nt, Artificial Sequence
  spacer sequence TTCN PAM
guaccuccguuucccuaucu

SEQ ID NO: 37275 - RNA, 20 nt, Artificial Sequence
  spacer sequence TTCN PAM
cuaucuacaagccagggaga

SEQ ID NO: 37276 - RNA, 20 nt, Artificial Sequence
  spacer sequence TTCN PAM
cccuggcuuguagauaggga

SEQ ID NO: 37277 - RNA, 20 nt, Artificial Sequence
  spacer sequence TTCN PAM
cguccuuuucucccuggcuu

SEQ ID NO: 37278 - RNA, 20 nt, Artificial Sequence
  spacer sequence TTCN PAM
cacacccagcagcguuaggu

SEQ ID NO: 37279 - RNA, 20 nt, Artificial Sequence
  spacer sequence TTCN PAM
agaccagccuggcuaacgug

SEQ ID NO: 37280 - RNA, 20 nt, Artificial Sequence
  spacer sequence TTCN PAM
cuaguagcugggauuacugg

SEQ ID NO: 37281 - RNA, 20 nt, Artificial Sequence
  spacer sequence TTCN PAM
ccugccucagcuucccuagu

SEQ ID NO: 37282 - RNA, 20 nt, Artificial Sequence
  spacer sequence TTCN PAM
agcaauucuccugccucagc

SEQ ID NO: 37283 - RNA, 20 nt, Artificial Sequence
  spacer sequence TTCN PAM
uagcugggggccuuuuuacu

SEQ ID NO: 37284 - RNA, 20 nt, Artificial Sequence
  spacer sequence TTCN PAM
aguaaaaaggcccccagcua

SEQ ID NO: 37285 - RNA, 20 nt, Artificial Sequence
  spacer sequence TTCN PAM
ucgaguaaaaaggcccccag

SEQ ID NO: 37286 - RNA, 20 nt, Artificial Sequence
  spacer sequence TTCN PAM
gaggggcuccacaagcagcc

SEQ ID NO: 37287 - RNA, 20 nt, Artificial Sequence
  spacer sequence TTCN PAM
ccaggcuggggcucuguccu

SEQ ID NO: 37288 - RNA, 20 nt, Artificial Sequence
  spacer sequence TTCN PAM
guuccccaggcuggggcucu

SEQ ID NO: 37289 - RNA, 20 nt, Artificial Sequence
  spacer sequence TTCN PAM
cugcccucauagacggcgcu

SEQ ID NO: 37290 - RNA, 20 nt, Artificial Sequence
  spacer sequence TTCN PAM
ccacagaugcugggcucccc

SEQ ID NO: 37291 - RNA, 20 nt, Artificial Sequence
  spacer sequence TTCN PAM
uagucaaggugcagaggccu

SEQ ID NO: 37292 - RNA, 20 nt, Artificial Sequence
  spacer sequence TTCN PAM
uuuuuuuuuuuuuuuuuuuu

SEQ ID NO: 37293 - RNA, 20 nt, Artificial Sequence
  spacer sequence TTCN PAM
agugauucuucugccucagc

SEQ ID NO: 37294 - RNA, 20 nt, Artificial Sequence
  spacer sequence TTCN PAM
ucugccucagccucccaagu

SEQ ID NO: 37295 - RNA, 20 nt, Artificial Sequence
  spacer sequence TTCN PAM
gccucagccucccaaguagc

SEQ ID NO: 37296 - RNA, 20 nt, Artificial Sequence
  spacer sequence TTCN PAM
ccauguuggccaggcugguc

SEQ ID NO: 37297 - RNA, 20 nt, Artificial Sequence
  spacer sequence TTCN PAM
agaccagccuggccaacaug

SEQ ID NO: 37298 - RNA, 20 nt, Artificial Sequence
  spacer sequence TTCN PAM
cuaggccccauccacauaaa

SEQ ID NO: 37299 - RNA, 20 nt, Artificial Sequence
  spacer sequence TTCN PAM
ucccagcagcccugagggag

SEQ ID NO: 37300 - RNA, 20 nt, Artificial Sequence
  spacer sequence TTCN PAM
cccacgucccggaggagaaa

SEQ ID NO: 37301 - RNA, 20 nt, Artificial Sequence
  spacer sequence TTCN PAM
ccuccgggacgugggggaac

SEQ ID NO: 37302 - RNA, 20 nt, Artificial Sequence
  spacer sequence TTCN PAM
gaucccaccugaccucucuu

SEQ ID NO: 37303 - RNA, 20 nt, Artificial Sequence
  spacer sequence TTCN PAM
ugcauaaaccagguuuggca

SEQ ID NO: 37304 - RNA, 20 nt, Artificial Sequence
  spacer sequence TTCN PAM
ggcccagcccaccccuuggg

SEQ ID NO: 37305 - RNA, 20 nt, Artificial Sequence
  spacer sequence TTCN PAM
gcugaguucuggcuccucgg

SEQ ID NO: 37306 - RNA, 20 nt, Artificial Sequence
  spacer sequence TTCN PAM
ggcuccucggggccaccugg

SEQ ID NO: 37307 - RNA, 20 nt, Artificial Sequence
  spacer sequence TTCN PAM
cccuccuccuccucuggacu

SEQ ID NO: 37308 - RNA, 20 nt, Artificial Sequence
  spacer sequence TTCN PAM
ugaucccagguggggcuggg

SEQ ID NO: 37309 - RNA, 20 nt, Artificial Sequence
  spacer sequence TTCN PAM
cuggcaaccuggcgggcagg

SEQ ID NO: 37310 - RNA, 20 nt, Artificial Sequence
  spacer sequence TTCN PAM
cucugcccccgcuagguacu

SEQ ID NO: 37311 - RNA, 20 nt, Artificial Sequence
  spacer sequence TTCN PAM
gggacaagggccucucugcu

SEQ ID NO: 37312 - RNA, 20 nt, Artificial Sequence
  spacer sequence TTCN PAM
aaagccccagcagaguucag

SEQ ID NO: 37313 - RNA, 20 nt, Artificial Sequence
  spacer sequence TTCN PAM
gggaauuccagaggcuucug

SEQ ID NO: 37314 - RNA, 20 nt, Artificial Sequence
  spacer sequence TTCN PAM
cagaaccauggaggggcccc

SEQ ID NO: 37315 - RNA, 20 nt, Artificial Sequence
  spacer sequence TTCN PAM
agaggcuucuggagagaugc

SEQ ID NO: 37316 - RNA, 20 nt, Artificial Sequence
  spacer sequence TTCN PAM
ggagagaugcuuauccgucc

SEQ ID NO: 37317 - RNA, 20 nt, Artificial Sequence
  spacer sequence TTCN PAM
gccuguacucagccaccccu

SEQ ID NO: 37318 - RNA, 20 nt, Artificial Sequence
  spacer sequence TTCN PAM
caucccucaggguugcaguc

SEQ ID NO: 37319 - RNA, 20 nt, Artificial Sequence
  spacer sequence TTCN PAM
uuuuucccaucccucagggu

SEQ ID NO: 37320 - RNA, 20 nt, Artificial Sequence
  spacer sequence TTCN PAM
gcauggccuccuugucugag

SEQ ID NO: 37321 - RNA, 20 nt, Artificial Sequence
  spacer sequence TTCN PAM
cuuguggggccgagacucag

SEQ ID NO: 37322 - RNA, 20 nt, Artificial Sequence
  spacer sequence TTCN PAM
ucaucagccaguuggcucua

SEQ ID NO: 37323 - RNA, 20 nt, Artificial Sequence
  spacer sequence TTCN PAM
uucugguaucaacagaguuc

SEQ ID NO: 37324 - RNA, 20 nt, Artificial Sequence
  spacer sequence TTCN PAM
gguaucaacagaguucaggg

SEQ ID NO: 37325 - RNA, 20 nt, Artificial Sequence
  spacer sequence TTCN PAM
gggugaggcugggaggagca

SEQ ID NO: 37326 - RNA, 20 nt, Artificial Sequence
  spacer sequence TTCN PAM
uguaggagggggugauuugg

SEQ ID NO: 37327 - RNA, 20 nt, Artificial Sequence
  spacer sequence TTCN PAM
gacuuugcuccaaaucaccc

SEQ ID NO: 37328 - RNA, 20 nt, Artificial Sequence
  spacer sequence TTCN PAM
gacacuugcucugucaucgc

SEQ ID NO: 37329 - RNA, 20 nt, Artificial Sequence
  spacer sequence TTCN PAM
ccucucugggucccagcucc

SEQ ID NO: 37330 - RNA, 20 nt, Artificial Sequence
  spacer sequence TTCN PAM
agagagggagcugggaccca

SEQ ID NO: 37331 - RNA, 20 nt, Artificial Sequence
  spacer sequence TTCN PAM
acuccgguuuucgagagagg

SEQ ID NO: 37332 - RNA, 20 nt, Artificial Sequence
  spacer sequence TTCN PAM
aagguguugcaggaagaguc

SEQ ID NO: 37333 - RNA, 20 nt, Artificial Sequence
  spacer sequence TTCN PAM
ugcaacaccuuggaaccguu

SEQ ID NO: 37334 - RNA, 20 nt, Artificial Sequence
  spacer sequence TTCN PAM
guccuggggcucuucccccg

SEQ ID NO: 37335 - RNA, 20 nt, Artificial Sequence
  spacer sequence TTCN PAM
cccgagggcagcgccgcugc

SEQ ID NO: 37336 - RNA, 20 nt, Artificial Sequence
  spacer sequence TTCN PAM
ugggcagcggcgcugcccuc

SEQ ID NO: 37337 - RNA, 20 nt, Artificial Sequence
  spacer sequence TTCN PAM
cugugucggccaaaaaaacc

SEQ ID NO: 37338 - RNA, 20 nt, Artificial Sequence
  spacer sequence TTCN PAM
ccugccucagccucccaagu

SEQ ID NO: 37339 - RNA, 20 nt, Artificial Sequence
  spacer sequence TTCN PAM
caccauucuccugccucagc

SEQ ID NO: 37340 - RNA, 20 nt, Artificial Sequence
  spacer sequence TTCN PAM
cugcaaccucugccucccgg

SEQ ID NO: 37341 - RNA, 20 nt, Artificial Sequence
  spacer sequence TTCN PAM
aggccacugggcccccuccc

SEQ ID NO: 37342 - RNA, 20 nt, Artificial Sequence
  spacer sequence TTCN PAM
gugaaucacuggggaggaau

SEQ ID NO: 37343 - RNA, 20 nt, Artificial Sequence
  spacer sequence TTCN PAM
cugaagccagcggguggggc

SEQ ID NO: 37344 - RNA, 20 nt, Artificial Sequence
  spacer sequence TTCN PAM
uccccagugauucacugaag

SEQ ID NO: 37345 - RNA, 20 nt, Artificial Sequence
  spacer sequence TTCN PAM
uccccacccaaccccgaccc

SEQ ID NO: 37346 - RNA, 20 nt, Artificial Sequence
  spacer sequence TTCN PAM
cccggaguugacgucugaug

SEQ ID NO: 37347 - RNA, 20 nt, Artificial Sequence
  spacer sequence TTCN PAM
uacacccgcccuccccgggg

SEQ ID NO: 37348 - RNA, 20 nt, Artificial Sequence
  spacer sequence TTCN PAM
gggccagaaggcacggugga

SEQ ID NO: 37349 - RNA, 20 nt, Artificial Sequence
  spacer sequence TTCN PAM
ggcccugaagggcugggcag

SEQ ID NO: 37350 - RNA, 20 nt, Artificial Sequence
  spacer sequence TTCN PAM
gcaaugagcccgacccccac

SEQ ID NO: 37351 - RNA, 20 nt, Artificial Sequence
  spacer sequence TTCN PAM
ugcagcccagagucugguau

SEQ ID NO: 37352 - RNA, 20 nt, Artificial Sequence
  spacer sequence TTCN PAM
ggugggagaaggcaaggccu

SEQ ID NO: 37353 - RNA, 20 nt, Artificial Sequence
  spacer sequence TTCN PAM
cccacccgaaaccgucagcc

SEQ ID NO: 37354 - RNA, 20 nt, Artificial Sequence
  spacer sequence TTCN PAM
gugagcugggcaggcggcgu

SEQ ID NO: 37355 - RNA, 20 nt, Artificial Sequence
  spacer sequence TTCN PAM
ucccaaagcgugacgcacag

SEQ ID NO: 37356 - RNA, 20 nt, Artificial Sequence
  spacer sequence TTCN PAM
ccaaugccgccugguuuuca

SEQ ID NO: 37357 - RNA, 20 nt, Artificial Sequence
  spacer sequence TTCN PAM
auguuuccccuauuuuaguu

SEQ ID NO: 37358 - RNA, 20 nt, Artificial Sequence
  spacer sequence TTCN PAM
ccuauuuuaguuucugacau

SEQ ID NO: 37359 - RNA, 20 nt, Artificial Sequence
  spacer sequence TTCN PAM
gacauuugauacgcgcggaa

SEQ ID NO: 37360 - RNA, 20 nt, Artificial Sequence
  spacer sequence TTCN PAM
gcgcguaucaaaugucagaa

SEQ ID NO: 37361 - RNA, 20 nt, Artificial Sequence
  spacer sequence TTCN PAM
acacggcuccccacggucuc

SEQ ID NO: 37362 - RNA, 20 nt, Artificial Sequence
  spacer sequence TTCN PAM
aguucagagaggggcuaagu

SEQ ID NO: 37363 - RNA, 20 nt, Artificial Sequence
  spacer sequence TTCN PAM
gagaggggcuaaguuuuucu

SEQ ID NO: 37364 - RNA, 20 nt, Artificial Sequence
  spacer sequence TTCN PAM
uuuuuuuucuuuuuuucuuu

SEQ ID NO: 37365 - RNA, 20 nt, Artificial Sequence
  spacer sequence TTCN PAM
uuuuuucuuuuuuuuuuuuu

SEQ ID NO: 37366 - RNA, 20 nt, Artificial Sequence
  spacer sequence TTCN PAM
uuuuuuuuuuuuuugaggcg

SEQ ID NO: 37367 - RNA, 20 nt, Artificial Sequence
  spacer sequence TTCN PAM
cagcauucuccugccucagc

SEQ ID NO: 37368 - RNA, 20 nt, Artificial Sequence
  spacer sequence TTCN PAM
ccugccucagccuccugagu

SEQ ID NO: 37369 - RNA, 20 nt, Artificial Sequence
  spacer sequence TTCN PAM
ccauuuuagccaggaugguc

SEQ ID NO: 37370 - RNA, 20 nt, Artificial Sequence
  spacer sequence TTCN PAM
uuugagacagggucuuucuc

SEQ ID NO: 37371 - RNA, 20 nt, Artificial Sequence
  spacer sequence TTCN PAM
cugucacccaggcuggagug

SEQ ID NO: 37372 - RNA, 20 nt, Artificial Sequence
  spacer sequence TTCN PAM
agugauucucccaccucagc

SEQ ID NO: 37373 - RNA, 20 nt, Artificial Sequence
  spacer sequence TTCN PAM
cccaccucagccucccaagu

SEQ ID NO: 37374 - RNA, 20 nt, Artificial Sequence
  spacer sequence TTCN PAM
ggugaggcuuccuuuccuca

SEQ ID NO: 37375 - RNA, 20 nt, Artificial Sequence
  spacer sequence TTCN PAM
uuuccucaacuaugaaagau

SEQ ID NO: 37376 - RNA, 20 nt, Artificial Sequence
  spacer sequence TTCN PAM
ucaacuaugaaagaugaugu

SEQ ID NO: 37377 - RNA, 20 nt, Artificial Sequence
  spacer sequence TTCN PAM
uaguugaggaaaggaagccu

SEQ ID NO: 37378 - RNA, 20 nt, Artificial Sequence
  spacer sequence TTCN PAM
ggugauccgccugccucggc

SEQ ID NO: 37379 - RNA, 20 nt, Artificial Sequence
  spacer sequence TTCN PAM
agaccagccuggccaacaug

SEQ ID NO: 37380 - RNA, 20 nt, Artificial Sequence
  spacer sequence TTCN PAM
ccauguuggccaggcugguc

SEQ ID NO: 37381 - RNA, 20 nt, Artificial Sequence
  spacer sequence TTCN PAM
ccauauuagccaggaugguc

SEQ ID NO: 37382 - RNA, 20 nt, Artificial Sequence
  spacer sequence TTCN PAM
ccugccucagccucccuaga

SEQ ID NO: 37383 - RNA, 20 nt, Artificial Sequence
  spacer sequence TTCN PAM
cgccauucuccugccucagc

SEQ ID NO: 37384 - RNA, 20 nt, Artificial Sequence
  spacer sequence TTCN PAM
uuuuuuugaggcggagucuc

SEQ ID NO: 37385 - RNA, 20 nt, Artificial Sequence
  spacer sequence TTCN PAM
ccugccucagccuccugagu

SEQ ID NO: 37386 - RNA, 20 nt, Artificial Sequence
  spacer sequence TTCN PAM
agcaauucuccugccucagc

SEQ ID NO: 37387 - RNA, 20 nt, Artificial Sequence
  spacer sequence TTCN PAM
ugucaggccuuguacccagc

SEQ ID NO: 37388 - RNA, 20 nt, Artificial Sequence
  spacer sequence TTCN PAM
gaugauggcucugggggagg

SEQ ID NO: 37389 - RNA, 20 nt, Artificial Sequence
  spacer sequence TTCN PAM
uggaggagguguccaugggc

SEQ ID NO: 37390 - RNA, 20 nt, Artificial Sequence
  spacer sequence TTCN PAM
gcagaggaagccguggagaa

SEQ ID NO: 37391 - RNA, 20 nt, Artificial Sequence
  spacer sequence TTCN PAM
ucugcugaagcccauggaca

SEQ ID NO: 37392 - RNA, 20 nt, Artificial Sequence
  spacer sequence TTCN PAM
ccacggcuuccucugcugaa

SEQ ID NO: 37393 - RNA, 20 nt, Artificial Sequence
  spacer sequence TTCN PAM
gcuucuccacggcuuccucu

SEQ ID NO: 37394 - RNA, 20 nt, Artificial Sequence
  spacer sequence TTCN PAM
uccaccccaaaccucgcccu

SEQ ID NO: 37395 - RNA, 20 nt, Artificial Sequence
  spacer sequence TTCN PAM
accccaaaccaggcccucuu

SEQ ID NO: 37396 - RNA, 20 nt, Artificial Sequence
  spacer sequence TTCN PAM
uccaacccaaaccagacccu

SEQ ID NO: 37397 - RNA, 20 nt, Artificial Sequence
  spacer sequence TTCN PAM
acccaaaccaggcccucuuc

SEQ ID NO: 37398 - RNA, 20 nt, Artificial Sequence
  spacer sequence TTCN PAM
acccaaaccagacccuccuc

SEQ ID NO: 37399 - RNA, 20 nt, Artificial Sequence
  spacer sequence TTCN PAM
accccaaaccagacccuccu

SEQ ID NO: 37400 - RNA, 20 nt, Artificial Sequence
  spacer sequence TTCN PAM
uccaccccaagccaggcccu

SEQ ID NO: 37401 - RNA, 20 nt, Artificial Sequence
  spacer sequence TTCN PAM
accccaaaccaggcccucuu

SEQ ID NO: 37402 - RNA, 20 nt, Artificial Sequence
  spacer sequence TTCN PAM
accccaaaccaggcccuccu

SEQ ID NO: 37403 - RNA, 20 nt, Artificial Sequence
  spacer sequence TTCN PAM
accccaaaccagacccuccu

SEQ ID NO: 37404 - RNA, 20 nt, Artificial Sequence
  spacer sequence TTCN PAM
gugggcaccuccaccccaag

SEQ ID NO: 37405 - RNA, 20 nt, Artificial Sequence
  spacer sequence TTCN PAM
ugcuaaggccaggagcaggg

SEQ ID NO: 37406 - RNA, 20 nt, Artificial Sequence
  spacer sequence TTCN PAM
cacacccugcuccuggccuu

SEQ ID NO: 37407 - RNA, 20 nt, Artificial Sequence
  spacer sequence TTCN PAM
guggcuccuggcaucugcag

SEQ ID NO: 37408 - RNA, 20 nt, Artificial Sequence
  spacer sequence TTCN PAM
cggaggucacacaccugcuc

SEQ ID NO: 37409 - RNA, 20 nt, Artificial Sequence
  spacer sequence TTCN PAM
aggagccuucccggagguca

SEQ ID NO: 37410 - RNA, 20 nt, Artificial Sequence
  spacer sequence TTCN PAM
ggcucucgcccucucccaag

SEQ ID NO: 37411 - RNA, 20 nt, Artificial Sequence
  spacer sequence TTCN PAM
uuugcccauccuggcuuuau

SEQ ID NO: 37412 - RNA, 20 nt, Artificial Sequence
  spacer sequence TTCN PAM
ccacccugcccugcccagcu

SEQ ID NO: 37413 - RNA, 20 nt, Artificial Sequence
  spacer sequence TTCN PAM
cggcucccacauccugguuc

SEQ ID NO: 37414 - RNA, 20 nt, Artificial Sequence
  spacer sequence TTCN PAM
cucugggccucaguuucucc

SEQ ID NO: 37415 - RNA, 20 nt, Artificial Sequence
  spacer sequence TTCN PAM
ccauuugacaucccuuagca

SEQ ID NO: 37416 - RNA, 20 nt, Artificial Sequence
  spacer sequence TTCN PAM
aucugacaauuacagauggc

SEQ ID NO: 37417 - RNA, 20 nt, Artificial Sequence
  spacer sequence TTCN PAM
acccugagcucacucugaga

SEQ ID NO: 37418 - RNA, 20 nt, Artificial Sequence
  spacer sequence TTCN PAM
uuggccgcaccauauuuauc

SEQ ID NO: 37419 - RNA, 20 nt, Artificial Sequence
  spacer sequence TTCN PAM
gagaucaaggcugaggccag

SEQ ID NO: 37420 - RNA, 20 nt, Artificial Sequence
  spacer sequence TTCN PAM
agcacuuugggaggccgagg

SEQ ID NO: 37421 - RNA, 20 nt, Artificial Sequence
  spacer sequence TTCN PAM
agaccaaccuggccaacaug

SEQ ID NO: 37422 - RNA, 20 nt, Artificial Sequence
  spacer sequence TTCN PAM
cgugccucagccuccugagu

SEQ ID NO: 37423 - RNA, 20 nt, Artificial Sequence
  spacer sequence TTCN PAM
agcaauucucgugccucagc

SEQ ID NO: 37424 - RNA, 20 nt, Artificial Sequence
  spacer sequence TTCN PAM
agguucaagcaauucucgug

SEQ ID NO: 37425 - RNA, 20 nt, Artificial Sequence
  spacer sequence TTCN PAM
aacauuugcagcccaauaaa

SEQ ID NO: 37426 - RNA, 20 nt, Artificial Sequence
  spacer sequence TTCN PAM
gagauucagguaugguugga

SEQ ID NO: 37427 - RNA, 20 nt, Artificial Sequence
  spacer sequence TTCN PAM
gguaugguuggaaucaggga

SEQ ID NO: 37428 - RNA, 20 nt, Artificial Sequence
  spacer sequence TTCN PAM
aaccauaccugaaucucuga

SEQ ID NO: 37429 - RNA, 20 nt, Artificial Sequence
  spacer sequence TTCN PAM
ggaugcuuugcugguguugg

SEQ ID NO: 37430 - RNA, 20 nt, Artificial Sequence
  spacer sequence TTCN PAM
cuaucucauuccaucagccu

SEQ ID NO: 37431 - RNA, 20 nt, Artificial Sequence
  spacer sequence TTCN PAM
aucagccuaacaagaccagc

SEQ ID NO: 37432 - RNA, 20 nt, Artificial Sequence
  spacer sequence TTCN PAM
cgcuggucuuguuaggcuga

SEQ ID NO: 37433 - RNA, 20 nt, Artificial Sequence
  spacer sequence TTCN PAM
gcauuaauuguaaaguccca

SEQ ID NO: 37434 - RNA, 20 nt, Artificial Sequence
  spacer sequence TTCN PAM
gagaugagcaugugacccag

SEQ ID NO: 37435 - RNA, 20 nt, Artificial Sequence
  spacer sequence TTCN PAM
cccucuggccucuguaauug

SEQ ID NO: 37436 - RNA, 20 nt, Artificial Sequence
  spacer sequence TTCN PAM
aagauggguaagugaccuag

SEQ ID NO: 37437 - RNA, 20 nt, Artificial Sequence
  spacer sequence TTCN PAM
gggauggguaagugacucau

SEQ ID NO: 37438 - RNA, 20 nt, Artificial Sequence
  spacer sequence TTCN PAM
cuggccucugugauugguuc

SEQ ID NO: 37439 - RNA, 20 nt, Artificial Sequence
  spacer sequence TTCN PAM
aggaugaguaaauggcccag

SEQ ID NO: 37440 - RNA, 20 nt, Artificial Sequence
  spacer sequence TTCN PAM
ggccucugugauugguucaa

SEQ ID NO: 37441 - RNA, 20 nt, Artificial Sequence
  spacer sequence TTCN PAM
ucucccuaggugcucugacu

SEQ ID NO: 37442 - RNA, 20 nt, Artificial Sequence
  spacer sequence TTCN PAM
uucuccucccucaguaagcc

SEQ ID NO: 37443 - RNA, 20 nt, Artificial Sequence
  spacer sequence TTCN PAM
ccucccucaguaagcccaga

SEQ ID NO: 37444 - RNA, 20 nt, Artificial Sequence
  spacer sequence TTCN PAM
ucccgugggguggagaccuc

SEQ ID NO: 37445 - RNA, 20 nt, Artificial Sequence
  spacer sequence TTCN PAM
ggggucuuggccucagccuu

SEQ ID NO: 37446 - RNA, 20 nt, Artificial Sequence
  spacer sequence TTCN PAM
ccgaguggagcccccguggg

SEQ ID NO: 37447 - RNA, 20 nt, Artificial Sequence
  spacer sequence TTCN PAM
ucuccuuguccuccccgucc

SEQ ID NO: 37448 - RNA, 20 nt, Artificial Sequence
  spacer sequence TTCN PAM
ugacugccuggcccuggaug

SEQ ID NO: 37449 - RNA, 20 nt, Artificial Sequence
  spacer sequence TTCN PAM
ccuccaggggcguggaccga

SEQ ID NO: 37450 - RNA, 20 nt, Artificial Sequence
  spacer sequence TTCN PAM
uggcagcgagacagcaguuc

SEQ ID NO: 37451 - RNA, 20 nt, Artificial Sequence
  spacer sequence TTCN PAM
ugagucuggagcaggcgaac

SEQ ID NO: 37452 - RNA, 20 nt, Artificial Sequence
  spacer sequence TTCN PAM
ccugcuccagacucaggaac

SEQ ID NO: 37453 - RNA, 20 nt, Artificial Sequence
  spacer sequence TTCN PAM
acaagccccaccuggccaac

SEQ ID NO: 37454 - RNA, 20 nt, Artificial Sequence
  spacer sequence TTCN PAM
gcaggcaaccgaccaccagg

SEQ ID NO: 37455 - RNA, 20 nt, Artificial Sequence
  spacer sequence TTCN PAM
accagcuccugguggucggu

SEQ ID NO: 37456 - RNA, 20 nt, Artificial Sequence
  spacer sequence TTCN PAM
ucacgcugugucuccuguac

SEQ ID NO: 37457 - RNA, 20 nt, Artificial Sequence
  spacer sequence TTCN PAM
auccucagcccggccccaga

SEQ ID NO: 37458 - RNA, 20 nt, Artificial Sequence
  spacer sequence TTCN PAM
gagagaugccucggggacau

SEQ ID NO: 37459 - RNA, 20 nt, Artificial Sequence
  spacer sequence TTCN PAM
agaggauucugagagaugcc

SEQ ID NO: 37460 - RNA, 20 nt, Artificial Sequence
  spacer sequence TTCN PAM
augccucuugcuuugugcuc

SEQ ID NO: 37461 - RNA, 20 nt, Artificial Sequence
  spacer sequence TTCN PAM
gccugcguccucugcgguuc

SEQ ID NO: 37462 - RNA, 20 nt, Artificial Sequence
  spacer sequence TTCN PAM
gggccccagacgagccccag

SEQ ID NO: 37463 - RNA, 20 nt, Artificial Sequence
  spacer sequence TTCN PAM
gcagccucagugcaggggcc

SEQ ID NO: 37464 - RNA, 20 nt, Artificial Sequence
  spacer sequence TTCN PAM
agcagaucagaugacuggga

SEQ ID NO: 37465 - RNA, 20 nt, Artificial Sequence
  spacer sequence TTCN PAM
ccgcuccucugccaccucuu

SEQ ID NO: 37466 - RNA, 20 nt, Artificial Sequence
  spacer sequence TTCN PAM
cagaggucuucuccccaacg

SEQ ID NO: 37467 - RNA, 20 nt, Artificial Sequence
  spacer sequence TTCN PAM
ccccaacgccagaugagaac

SEQ ID NO: 37468 - RNA, 20 nt, Artificial Sequence
  spacer sequence TTCN PAM
caucuggcguuggggagaag

SEQ ID NO: 37469 - RNA, 20 nt, Artificial Sequence
  spacer sequence TTCN PAM
ggucagaguucucaucuggc

SEQ ID NO: 37470 - RNA, 20 nt, Artificial Sequence
  spacer sequence TTCN PAM
caccggaugccugggaggag

SEQ ID NO: 37471 - RNA, 20 nt, Artificial Sequence
  spacer sequence TTCN PAM
aauguucugcccucccugcu

SEQ ID NO: 37472 - RNA, 20 nt, Artificial Sequence
  spacer sequence TTCN PAM
gcccucccugcuccccuaca

SEQ ID NO: 37473 - RNA, 20 nt, Artificial Sequence
  spacer sequence TTCN PAM
ucagccccauccaccuacac

SEQ ID NO: 37474 - RNA, 20 nt, Artificial Sequence
  spacer sequence TTCN PAM
gccccauccaccuacacuca

SEQ ID NO: 37475 - RNA, 20 nt, Artificial Sequence
  spacer sequence TTCN PAM
acuguccacgccacguuuga

SEQ ID NO: 37476 - RNA, 20 nt, Artificial Sequence
  spacer sequence TTCN PAM
cugcccgggaggagcacugu

SEQ ID NO: 37477 - RNA, 20 nt, Artificial Sequence
  spacer sequence TTCN PAM
uucucugcccgggaggagca

SEQ ID NO: 37478 - RNA, 20 nt, Artificial Sequence
  spacer sequence TTCN PAM
agacucacccauugcuccuu

SEQ ID NO: 37479 - RNA, 20 nt, Artificial Sequence
  spacer sequence TTCN PAM
gcccugcccggugcagaguc

SEQ ID NO: 37480 - RNA, 20 nt, Artificial Sequence
  spacer sequence TTCN PAM
uuuccuguaguacgcuggca

SEQ ID NO: 37481 - RNA, 20 nt, Artificial Sequence
  spacer sequence TTCN PAM
uguaguacgcuggcaucaac

SEQ ID NO: 37482 - RNA, 20 nt, Artificial Sequence
  spacer sequence TTCN PAM
ugcccaggagcauacucacc

SEQ ID NO: 37483 - RNA, 20 nt, Artificial Sequence
  spacer sequence TTCN PAM
cccccacaucugugccccug

SEQ ID NO: 37484 - RNA, 20 nt, Artificial Sequence
  spacer sequence TTCN PAM
caauugguagugucugcuca

SEQ ID NO: 37485 - RNA, 20 nt, Artificial Sequence
  spacer sequence TTCN PAM
cgccauucuccugccucagc

SEQ ID NO: 37486 - RNA, 20 nt, Artificial Sequence
  spacer sequence TTCN PAM
ccugccucagccucccgagu

SEQ ID NO: 37487 - RNA, 20 nt, Artificial Sequence
  spacer sequence TTCN PAM
gacccucuacuccuaguaau

SEQ ID NO: 37488 - RNA, 20 nt, Artificial Sequence
  spacer sequence TTCN PAM
aggccucucuaaugaauugg

SEQ ID NO: 37489 - RNA, 20 nt, Artificial Sequence
  spacer sequence TTCN PAM
cccgauccagguccuaccac

SEQ ID NO: 37490 - RNA, 20 nt, Artificial Sequence
  spacer sequence TTCN PAM
ugccuccuuuuugcaggucc

SEQ ID NO: 37491 - RNA, 20 nt, Artificial Sequence
  spacer sequence TTCN PAM
aggaccugcaaaaaggaggc

SEQ ID NO: 37492 - RNA, 20 nt, Artificial Sequence
  spacer sequence TTCN PAM
ugugacgggucacccguaug

SEQ ID NO: 37493 - RNA, 20 nt, Artificial Sequence
  spacer sequence TTCN PAM
cagcgcucugccauggcguu

SEQ ID NO: 37494 - RNA, 20 nt, Artificial Sequence
  spacer sequence TTCN PAM
uucugcuucuaagacuuugc

SEQ ID NO: 37495 - RNA, 20 nt, Artificial Sequence
  spacer sequence TTCN PAM
gcuucuaagacuuugccaaa

SEQ ID NO: 37496 - RNA, 20 nt, Artificial Sequence
  spacer sequence TTCN PAM
aagacuuugccaaaugcccu

SEQ ID NO: 37497 - RNA, 20 nt, Artificial Sequence
  spacer sequence TTCN PAM
uagacccagggcauuuggca

SEQ ID NO: 37498 - RNA, 20 nt, Artificial Sequence
  spacer sequence TTCN PAM
uucuuagacccagggcauuu

SEQ ID NO: 37499 - RNA, 20 nt, Artificial Sequence
  spacer sequence TTCN PAM
gggagaccccagucugaugg

SEQ ID NO: 37500 - RNA, 20 nt, Artificial Sequence
  spacer sequence TTCN PAM
cagagaucccaggcugaugg

SEQ ID NO: 37501 - RNA, 20 nt, Artificial Sequence
  spacer sequence TTCN PAM
ucucaaaaaaaaaacaaaau

SEQ ID NO: 37502 - RNA, 20 nt, Artificial Sequence
  spacer sequence TTCN PAM
gccucccaaaguguugggau

SEQ ID NO: 37503 - RNA, 20 nt, Artificial Sequence
  spacer sequence TTCN PAM
ccugccucggccucccgggu

SEQ ID NO: 37504 - RNA, 20 nt, Artificial Sequence
  spacer sequence TTCN PAM
aaggauucuccugccucggc

SEQ ID NO: 37505 - RNA, 20 nt, Artificial Sequence
  spacer sequence TTCN PAM
cuccauuugcccaggcugga

SEQ ID NO: 37506 - RNA, 20 nt, Artificial Sequence
  spacer sequence TTCN PAM
gugagccgagaucacgcacu

SEQ ID NO: 37507 - RNA, 20 nt, Artificial Sequence
  spacer sequence TTCN PAM
ggaggcagagguuucgguga

SEQ ID NO: 37508 - RNA, 20 nt, Artificial Sequence
  spacer sequence TTCN PAM
agugauucuccugccucagc

SEQ ID NO: 37509 - RNA, 20 nt, Artificial Sequence
  spacer sequence TTCN PAM
ccugccucagccucucgagu

SEQ ID NO: 37510 - RNA, 20 nt, Artificial Sequence
  spacer sequence TTCN PAM
ccauauuggccaggcugguc

SEQ ID NO: 37511 - RNA, 20 nt, Artificial Sequence
  spacer sequence TTCN PAM
agaccagccuggccaauaug

SEQ ID NO: 37512 - RNA, 20 nt, Artificial Sequence
  spacer sequence TTCN PAM
guccuguuuuuuuaagauuu

SEQ ID NO: 37513 - RNA, 20 nt, Artificial Sequence
  spacer sequence TTCN PAM
ccacauuggccaggcugguc

SEQ ID NO: 37514 - RNA, 20 nt, Artificial Sequence
  spacer sequence TTCN PAM
ccugccucagccucccgagu

SEQ ID NO: 37515 - RNA, 20 nt, Artificial Sequence
  spacer sequence TTCN PAM
agcgauucuccugccucagc

SEQ ID NO: 37516 - RNA, 20 nt, Artificial Sequence
  spacer sequence TTCN PAM
uguaaugagucagccccuug

SEQ ID NO: 37517 - RNA, 20 nt, Artificial Sequence
  spacer sequence TTCN PAM
aaggggcugacucauuacag

SEQ ID NO: 37518 - RNA, 20 nt, Artificial Sequence
  spacer sequence TTCN PAM
gucugauuuuccaaggggcu

SEQ ID NO: 37519 - RNA, 20 nt, Artificial Sequence
  spacer sequence TTCN PAM
gccugcugagcagacacauu

SEQ ID NO: 37520 - RNA, 20 nt, Artificial Sequence
  spacer sequence TTCN PAM
agaaguuacucugugagagg

SEQ ID NO: 37521 - RNA, 20 nt, Artificial Sequence
  spacer sequence TTCN PAM
ggaaugugucugcucagcag

SEQ ID NO: 37522 - RNA, 20 nt, Artificial Sequence
  spacer sequence TTCN PAM
ucuaaaccucucacagagua

SEQ ID NO: 37523 - RNA, 20 nt, Artificial Sequence
  spacer sequence TTCN PAM
uagugaaauuuccaggggcg

SEQ ID NO: 37524 - RNA, 20 nt, Artificial Sequence
  spacer sequence TTCN PAM
cuaggaauucgucuaaaccu

SEQ ID NO: 37525 - RNA, 20 nt, Artificial Sequence
  spacer sequence TTCN PAM
aggggcgggagagcgugucu

SEQ ID NO: 37526 - RNA, 20 nt, Artificial Sequence
  spacer sequence TTCN PAM
agacacgcucucccgccccu

SEQ ID NO: 37527 - RNA, 20 nt, Artificial Sequence
  spacer sequence TTCN PAM
uauucuuuccugguuuccuc

SEQ ID NO: 37528 - RNA, 20 nt, Artificial Sequence
  spacer sequence TTCN PAM
uuccugguuuccuccuggcu

SEQ ID NO: 37529 - RNA, 20 nt, Artificial Sequence
  spacer sequence TTCN PAM
ugguuuccuccuggcucagu

SEQ ID NO: 37530 - RNA, 20 nt, Artificial Sequence
  spacer sequence TTCN PAM
uccuggcucaguguaucaug

SEQ ID NO: 37531 - RNA, 20 nt, Artificial Sequence
  spacer sequence TTCN PAM
cuggcauaucaugauacacu

SEQ ID NO: 37532 - RNA, 20 nt, Artificial Sequence
  spacer sequence TTCN PAM
ccuccuuucccuggcauauc

SEQ ID NO: 37533 - RNA, 20 nt, Artificial Sequence
  spacer sequence TTCN PAM
cuuuuuuguuuguuugguuu

SEQ ID NO: 37534 - RNA, 20 nt, Artificial Sequence
  spacer sequence TTCN PAM
agcgauucuccugccucaac

SEQ ID NO: 37535 - RNA, 20 nt, Artificial Sequence
  spacer sequence TTCN PAM
ccugccucaacccccggagu

SEQ ID NO: 37536 - RNA, 20 nt, Artificial Sequence
  spacer sequence TTCN PAM
ccauguugggcaggaugguc

SEQ ID NO: 37537 - RNA, 20 nt, Artificial Sequence
  spacer sequence TTCN PAM
agaccauccugcccaacaug

SEQ ID NO: 37538 - RNA, 20 nt, Artificial Sequence
  spacer sequence TTCN PAM
caaaaugccaggauuacagg

SEQ ID NO: 37539 - RNA, 20 nt, Artificial Sequence
  spacer sequence TTCN PAM
ccauguuggucacgcugguc

SEQ ID NO: 37540 - RNA, 20 nt, Artificial Sequence
  spacer sequence TTCN PAM
uagagacaggguuucaccau

SEQ ID NO: 37541 - RNA, 20 nt, Artificial Sequence
  spacer sequence TTCN PAM
cguaacugaaacaucaaugu

SEQ ID NO: 37542 - RNA, 20 nt, Artificial Sequence
  spacer sequence TTCN PAM
guuacgggaacccauaaagc

SEQ ID NO: 37543 - RNA, 20 nt, Artificial Sequence
  spacer sequence TTCN PAM
ggcucagcugguuccaggug

SEQ ID NO: 37544 - RNA, 20 nt, Artificial Sequence
  spacer sequence TTCN PAM
aggugccacacagcauccuc

SEQ ID NO: 37545 - RNA, 20 nt, Artificial Sequence
  spacer sequence TTCN PAM
uucgguguugggagcucagg

SEQ ID NO: 37546 - RNA, 20 nt, Artificial Sequence
  spacer sequence TTCN PAM
guguugggagcucaggcucc

SEQ ID NO: 37547 - RNA, 20 nt, Artificial Sequence
  spacer sequence TTCN PAM
cuuacagauaaggacacuga

SEQ ID NO: 37548 - RNA, 20 nt, Artificial Sequence
  spacer sequence TTCN PAM
ccaggugcccggugacccuc

SEQ ID NO: 37549 - RNA, 20 nt, Artificial Sequence
  spacer sequence TTCN PAM
ucacugauuuucaccaggug

SEQ ID NO: 37550 - RNA, 20 nt, Artificial Sequence
  spacer sequence TTCN PAM
uauuccucacugauuuucac

SEQ ID NO: 37551 - RNA, 20 nt, Artificial Sequence
  spacer sequence TTCN PAM
uucuuauuccucacugauuu

SEQ ID NO: 37552 - RNA, 20 nt, Artificial Sequence
  spacer sequence TTCN PAM
ccauguuagccaggaugguc

SEQ ID NO: 37553 - RNA, 20 nt, Artificial Sequence
  spacer sequence TTCN PAM
ccccacucuccugcgucagc

SEQ ID NO: 37554 - RNA, 20 nt, Artificial Sequence
  spacer sequence TTCN PAM
uuuuuuuuuuuuuuuuuuuu

SEQ ID NO: 37555 - RNA, 20 nt, Artificial Sequence
  spacer sequence TTCN PAM
uucuuuuuuuuuuuuuuuuu

SEQ ID NO: 37556 - RNA, 20 nt, Artificial Sequence
  spacer sequence TTCN PAM
gaccaaguaaauuaacgaau

SEQ ID NO: 37557 - RNA, 20 nt, Artificial Sequence
  spacer sequence TTCN PAM
uuaauuuacuuggucagaac

SEQ ID NO: 37558 - RNA, 20 nt, Artificial Sequence
  spacer sequence TTCN PAM
augugacuuucuggugugag

SEQ ID NO: 37559 - RNA, 20 nt, Artificial Sequence
  spacer sequence TTCN PAM
ggugugagccggagaggagc

SEQ ID NO: 37560 - RNA, 20 nt, Artificial Sequence
  spacer sequence TTCN PAM
cccuggcggggcgagggccg

SEQ ID NO: 37561 - RNA, 20 nt, Artificial Sequence
  spacer sequence TTCN PAM
cauucccguaaccggauggu

SEQ ID NO: 37562 - RNA, 20 nt, Artificial Sequence
  spacer sequence TTCN PAM
cguaaccggaugguguuugc

SEQ ID NO: 37563 - RNA, 20 nt, Artificial Sequence
  spacer sequence TTCN PAM
aggagcacuaagcaaacacc

SEQ ID NO: 37564 - RNA, 20 nt, Artificial Sequence
  spacer sequence TTCN PAM
ggaggccaagacggguggau

SEQ ID NO: 37565 - RNA, 20 nt, Artificial Sequence
  spacer sequence TTCN PAM
agaccagccuggccaacgug

SEQ ID NO: 37566 - RNA, 20 nt, Artificial Sequence
  spacer sequence TTCN PAM
ccuguaaucccagcuacuca

SEQ ID NO: 37567 - RNA, 20 nt, Artificial Sequence
  spacer sequence TTCN PAM
ugaguagcugggauuacagg

SEQ ID NO: 37568 - RNA, 20 nt, Artificial Sequence
  spacer sequence TTCN PAM
ccugccucagcuuccugagu

SEQ ID NO: 37569 - RNA, 20 nt, Artificial Sequence
  spacer sequence TTCN PAM
agcaauucuccugccucagc

SEQ ID NO: 37570 - RNA, 20 nt, Artificial Sequence
  spacer sequence TTCN PAM
ucugucacccaggcuggagu

SEQ ID NO: 37571 - RNA, 20 nt, Artificial Sequence
  spacer sequence TTCN PAM
caccauguuucccaagcugg

SEQ ID NO: 37572 - RNA, 20 nt, Artificial Sequence
  spacer sequence TTCN PAM
caagcuggucuugaacuccu

SEQ ID NO: 37573 - RNA, 20 nt, Artificial Sequence
  spacer sequence TTCN PAM
agaccagcuugggaaacaug

SEQ ID NO: 37574 - RNA, 20 nt, Artificial Sequence
  spacer sequence TTCN PAM
accucuaaauaguuggucag

SEQ ID NO: 37575 - RNA, 20 nt, Artificial Sequence
  spacer sequence TTCN PAM
ccuuguuagccaggaugguc

SEQ ID NO: 37576 - RNA, 20 nt, Artificial Sequence
  spacer sequence TTCN PAM
ccugccucagccuccugagu

SEQ ID NO: 37577 - RNA, 20 nt, Artificial Sequence
  spacer sequence TTCN PAM
agugauucuccugccucagc

SEQ ID NO: 37578 - RNA, 20 nt, Artificial Sequence
  spacer sequence TTCN PAM
ggcuaauuuuauuuauuuau

SEQ ID NO: 37579 - RNA, 20 nt, Artificial Sequence
  spacer sequence TTCN PAM
acagcagccagagggcgccu

SEQ ID NO: 37580 - RNA, 20 nt, Artificial Sequence
  spacer sequence TTCN PAM
cucuggguagaagcccaagu

SEQ ID NO: 37581 - RNA, 20 nt, Artificial Sequence
  spacer sequence TTCN PAM
acccagagggaaaugggagc

SEQ ID NO: 37582 - RNA, 20 nt, Artificial Sequence
  spacer sequence TTCN PAM
cccccuccuccucuacccag

SEQ ID NO: 37583 - RNA, 20 nt, Artificial Sequence
  spacer sequence TTCN PAM
ucccugucucccccucccuc

SEQ ID NO: 37584 - RNA, 20 nt, Artificial Sequence
  spacer sequence TTCN PAM
ccaaagccuugaaagaagug

SEQ ID NO: 37585 - RNA, 20 nt, Artificial Sequence
  spacer sequence TTCN PAM
gccauauuuacugagcaaca

SEQ ID NO: 37586 - RNA, 20 nt, Artificial Sequence
  spacer sequence TTCN PAM
ggaggcugaggcaggaggcu

SEQ ID NO: 37587 - RNA, 20 nt, Artificial Sequence
  spacer sequence TTCN PAM
cuccccuggucacccuaagu

SEQ ID NO: 37588 - RNA, 20 nt, Artificial Sequence
  spacer sequence TTCN PAM
aaaaaaaaaaaaaaaugagc

SEQ ID NO: 37589 - RNA, 20 nt, Artificial Sequence
  spacer sequence TTCN PAM
agcaauucuccugcuucagc

SEQ ID NO: 37590 - RNA, 20 nt, Artificial Sequence
  spacer sequence TTCN PAM
ccugcuucagccuccugagu

SEQ ID NO: 37591 - RNA, 20 nt, Artificial Sequence
  spacer sequence TTCN PAM
gccuccugaguagcugggau

SEQ ID NO: 37592 - RNA, 20 nt, Artificial Sequence
  spacer sequence TTCN PAM
ccauguuggccagggugguc

SEQ ID NO: 37593 - RNA, 20 nt, Artificial Sequence
  spacer sequence TTCN PAM
agaccacccuggccaacaug

SEQ ID NO: 37594 - RNA, 20 nt, Artificial Sequence
  spacer sequence TTCN PAM
ccaucccucuaucccgccag

SEQ ID NO: 37595 - RNA, 20 nt, Artificial Sequence
  spacer sequence TTCN PAM
cggauagggcaggaggcuga

SEQ ID NO: 37596 - RNA, 20 nt, Artificial Sequence
  spacer sequence TTCN PAM
ugcccggcagcccgugagga

SEQ ID NO: 37597 - RNA, 20 nt, Artificial Sequence
  spacer sequence TTCN PAM
ggacuguccggcccccagcu

SEQ ID NO: 37598 - RNA, 20 nt, Artificial Sequence
  spacer sequence TTCN PAM
ccaccucucugugcucagcc

SEQ ID NO: 37599 - RNA, 20 nt, Artificial Sequence
  spacer sequence TTCN PAM
caacacccucaauaaauuca

SEQ ID NO: 37600 - RNA, 20 nt, Artificial Sequence
  spacer sequence TTCN PAM
cagguggcucaggccuguaa

SEQ ID NO: 37601 - RNA, 20 nt, Artificial Sequence
  spacer sequence TTCN PAM
ccauguuggccaggcugguc

SEQ ID NO: 37602 - RNA, 20 nt, Artificial Sequence
  spacer sequence TTCN PAM
ccugccucagccucccgagu

SEQ ID NO: 37603 - RNA, 20 nt, Artificial Sequence
  spacer sequence TTCN PAM
agcgauucuccugccucagc

SEQ ID NO: 37604 - RNA, 20 nt, Artificial Sequence
  spacer sequence TTCN PAM
cuccagccucagcaauaaga

SEQ ID NO: 37605 - RNA, 20 nt, Artificial Sequence
  spacer sequence TTCN PAM
ccauguuggucaggaugguc

SEQ ID NO: 37606 - RNA, 20 nt, Artificial Sequence
  spacer sequence TTCN PAM
ccugccucagccuccugagu

SEQ ID NO: 37607 - RNA, 20 nt, Artificial Sequence
  spacer sequence TTCN PAM
agcgauuccccugccucagc

SEQ ID NO: 37608 - RNA, 20 nt, Artificial Sequence
  spacer sequence TTCN PAM
agcaauucuccugccucagc

SEQ ID NO: 37609 - RNA, 20 nt, Artificial Sequence
  spacer sequence TTCN PAM
ccugccucagccucccaagu

SEQ ID NO: 37610 - RNA, 20 nt, Artificial Sequence
  spacer sequence TTCN PAM
ccuuuuagccccagauaaca

SEQ ID NO: 37611 - RNA, 20 nt, Artificial Sequence
  spacer sequence TTCN PAM
auucucgauguuuaucugcu

SEQ ID NO: 37612 - RNA, 20 nt, Artificial Sequence
  spacer sequence TTCN PAM
cgauguuuaucugcucgccu

SEQ ID NO: 37613 - RNA, 20 nt, Artificial Sequence
  spacer sequence TTCN PAM
gcaggcgagcagauaaacau

SEQ ID NO: 37614 - RNA, 20 nt, Artificial Sequence
  spacer sequence TTCN PAM
agggcugggcuguuaugaau

SEQ ID NO: 37615 - RNA, 20 nt, Artificial Sequence
  spacer sequence TTCN PAM
uaacagcccagcccuggaag

SEQ ID NO: 37616 - RNA, 20 nt, Artificial Sequence
  spacer sequence TTCN PAM
ggaggccaaggugggagggu

SEQ ID NO: 37617 - RNA, 20 nt, Artificial Sequence
  spacer sequence TTCN PAM
agaccauccuggccaacaug

SEQ ID NO: 37618 - RNA, 20 nt, Artificial Sequence
  spacer sequence TTCN PAM
ccugccucagccucccaagu

SEQ ID NO: 37619 - RNA, 20 nt, Artificial Sequence
  spacer sequence TTCN PAM
agcgcuucuccugccucagc

SEQ ID NO: 37620 - RNA, 20 nt, Artificial Sequence
  spacer sequence TTCN PAM
aaucaaaacaaacaaaaaaa

SEQ ID NO: 37621 - RNA, 20 nt, Artificial Sequence
  spacer sequence TTCN PAM
aacucucgcucuguugccca

SEQ ID NO: 37622 - RNA, 20 nt, Artificial Sequence
  spacer sequence TTCN PAM
cuucucagggaaaggaacuu

SEQ ID NO: 37623 - RNA, 20 nt, Artificial Sequence
  spacer sequence TTCN PAM
cagggaaaggaacuuccaga

SEQ ID NO: 37624 - RNA, 20 nt, Artificial Sequence
  spacer sequence TTCN PAM
cugagaagagaagcuccagg

SEQ ID NO: 37625 - RNA, 20 nt, Artificial Sequence
  spacer sequence TTCN PAM
uuucccugagaagagaagcu

SEQ ID NO: 37626 - RNA, 20 nt, Artificial Sequence
  spacer sequence TTCN PAM
agacucagaaaacuggggca

SEQ ID NO: 37627 - RNA, 20 nt, Artificial Sequence
  spacer sequence TTCN PAM
gagucuggaaguuccuuucc

SEQ ID NO: 37628 - RNA, 20 nt, Artificial Sequence
  spacer sequence TTCN PAM
ugccccaguuuucugagucu

SEQ ID NO: 37629 - RNA, 20 nt, Artificial Sequence
  spacer sequence TTCN PAM
agcccaccggaucucaggca

SEQ ID NO: 37630 - RNA, 20 nt, Artificial Sequence
  spacer sequence TTCN PAM
aggaggauugccugaacucg

SEQ ID NO: 37631 - RNA, 20 nt, Artificial Sequence
  spacer sequence TTCN PAM
ggcaauccuccuggaagcug

SEQ ID NO: 37632 - RNA, 20 nt, Artificial Sequence
  spacer sequence TTCN PAM
gcgaguucaggcaauccucc

SEQ ID NO: 37633 - RNA, 20 nt, Artificial Sequence
  spacer sequence TTCN PAM
cuccugggcacaugguuuuc

SEQ ID NO: 37634 - RNA, 20 nt, Artificial Sequence
  spacer sequence TTCN PAM
gaugaugaacacacacccug

SEQ ID NO: 37635 - RNA, 20 nt, Artificial Sequence
  spacer sequence TTCN PAM
ucaucugaaaaccaugugcc

SEQ ID NO: 37636 - RNA, 20 nt, Artificial Sequence
  spacer sequence TTCN PAM
aacgccagggugaggccuca

SEQ ID NO: 37637 - RNA, 20 nt, Artificial Sequence
  spacer sequence TTCN PAM
ccuccuguggacuaaacccg

SEQ ID NO: 37638 - RNA, 20 nt, Artificial Sequence
  spacer sequence TTCN PAM
cucccagcagccaguguggc

SEQ ID NO: 37639 - RNA, 20 nt, Artificial Sequence
  spacer sequence TTCN PAM
cauucccucccagcagccag

SEQ ID NO: 37640 - RNA, 20 nt, Artificial Sequence
  spacer sequence TTCN PAM
acggcggcugcccgcuuccc

SEQ ID NO: 37641 - RNA, 20 nt, Artificial Sequence
  spacer sequence TTCN PAM
gaaagccagacagcggcgcc

SEQ ID NO: 37642 - RNA, 20 nt, Artificial Sequence
  spacer sequence TTCN PAM
gaagcacugauccauguuuu

SEQ ID NO: 37643 - RNA, 20 nt, Artificial Sequence
  spacer sequence TTCN PAM
ucggagccgcacgguggggu

SEQ ID NO: 37644 - RNA, 20 nt, Artificial Sequence
  spacer sequence TTCN PAM
guuaucugggguggauuccu

SEQ ID NO: 37645 - RNA, 20 nt, Artificial Sequence
  spacer sequence TTCN PAM
cagcagcaugagccacggga

SEQ ID NO: 37646 - RNA, 20 nt, Artificial Sequence
  spacer sequence TTCN PAM
guccaccccuggcucccgug

SEQ ID NO: 37647 - RNA, 20 nt, Artificial Sequence
  spacer sequence TTCN PAM
acgccuggcuccuguggcuc

SEQ ID NO: 37648 - RNA, 20 nt, Artificial Sequence
  spacer sequence TTCN PAM
uuccacgccuggcuccugug

SEQ ID NO: 37649 - RNA, 20 nt, Artificial Sequence
  spacer sequence TTCN PAM
acgcuuggcucucguaacuc

SEQ ID NO: 37650 - RNA, 20 nt, Artificial Sequence
  spacer sequence TTCN PAM
uuccacgcuuggcucucgua

SEQ ID NO: 37651 - RNA, 20 nt, Artificial Sequence
  spacer sequence TTCN PAM
cgggagccaggcauggacgg

SEQ ID NO: 37652 - RNA, 20 nt, Artificial Sequence
  spacer sequence TTCN PAM
acgccuggcuccuguggacu

SEQ ID NO: 37653 - RNA, 20 nt, Artificial Sequence
  spacer sequence TTCN PAM
uuccacgccuggcuccugug

SEQ ID NO: 37654 - RNA, 20 nt, Artificial Sequence
  spacer sequence TTCN PAM
cgggagccaggcguggaugg

SEQ ID NO: 37655 - RNA, 20 nt, Artificial Sequence
  spacer sequence TTCN PAM
auccacgccuggcucccgug

SEQ ID NO: 37656 - RNA, 20 nt, Artificial Sequence
  spacer sequence TTCN PAM
ugucgggcauccgucugagc

SEQ ID NO: 37657 - RNA, 20 nt, Artificial Sequence
  spacer sequence TTCN PAM
augaaauguccagggccagg

SEQ ID NO: 37658 - RNA, 20 nt, Artificial Sequence
  spacer sequence TTCN PAM
uggaaaugggaucacacgcu

SEQ ID NO: 37659 - RNA, 20 nt, Artificial Sequence
  spacer sequence TTCN PAM
agcguggcaacauagcaaga

SEQ ID NO: 37660 - RNA, 20 nt, Artificial Sequence
  spacer sequence TTCN PAM
ucccaugaggaggucaaagu

SEQ ID NO: 37661 - RNA, 20 nt, Artificial Sequence
  spacer sequence TTCN PAM
ccugccucagccuccugagu

SEQ ID NO: 37662 - RNA, 20 nt, Artificial Sequence
  spacer sequence TTCN PAM
ggccauucuccugccucagc

SEQ ID NO: 37663 - RNA, 20 nt, Artificial Sequence
  spacer sequence TTCN PAM
cccaggcuggagugcagugg

SEQ ID NO: 37664 - RNA, 20 nt, Artificial Sequence
  spacer sequence TTCN PAM
cucuuucgcccaggcuggag

SEQ ID NO: 37665 - RNA, 20 nt, Artificial Sequence
  spacer sequence TTCN PAM
uuuuauuuuuugagacggag

SEQ ID NO: 37666 - RNA, 20 nt, Artificial Sequence
  spacer sequence TTCN PAM
uuucuuuuuauuuuuugaga

SEQ ID NO: 37667 - RNA, 20 nt, Artificial Sequence
  spacer sequence TTCN PAM
uuucuuuucuuuuuauuuuu

SEQ ID NO: 37668 - RNA, 20 nt, Artificial Sequence
  spacer sequence TTCN PAM
uuucuuuucuuuucuuuuua

SEQ ID NO: 37669 - RNA, 20 nt, Artificial Sequence
  spacer sequence TTCN PAM
uuucuuuucuuuucuuuucu

SEQ ID NO: 37670 - RNA, 20 nt, Artificial Sequence
  spacer sequence TTCN PAM
cuugccucagccucccgagc

SEQ ID NO: 37671 - RNA, 20 nt, Artificial Sequence
  spacer sequence TTCN PAM
agcgauucucuugccucagc

SEQ ID NO: 37672 - RNA, 20 nt, Artificial Sequence
  spacer sequence TTCN PAM
gagacggagucuugcagugg

SEQ ID NO: 37673 - RNA, 20 nt, Artificial Sequence
  spacer sequence TTCN PAM
gcugccuggucuguggcgac

SEQ ID NO: 37674 - RNA, 20 nt, Artificial Sequence
  spacer sequence TTCN PAM
gagcgucucacugccccagc

SEQ ID NO: 37675 - RNA, 20 nt, Artificial Sequence
  spacer sequence TTCN PAM
agccaggcggccugggaggg

SEQ ID NO: 37676 - RNA, 20 nt, Artificial Sequence
  spacer sequence TTCN PAM
aagacaaaaccgaggugggg

SEQ ID NO: 37677 - RNA, 20 nt, Artificial Sequence
  spacer sequence TTCN PAM
ggcugagccaccgucuaggu

SEQ ID NO: 37678 - RNA, 20 nt, Artificial Sequence
  spacer sequence TTCN PAM
accuccgucaacccuggaga

SEQ ID NO: 37679 - RNA, 20 nt, Artificial Sequence
  spacer sequence TTCN PAM
ucuccaggguugacggaggu

SEQ ID NO: 37680 - RNA, 20 nt, Artificial Sequence
  spacer sequence TTCN PAM
cugcuucaucuccaggguug

SEQ ID NO: 37681 - RNA, 20 nt, Artificial Sequence
  spacer sequence TTCN PAM
ccggggacucacacaccgcc

SEQ ID NO: 37682 - RNA, 20 nt, Artificial Sequence
  spacer sequence TTCN PAM
cucccuuguccuccucgagg

SEQ ID NO: 37683 - RNA, 20 nt, Artificial Sequence
  spacer sequence TTCN PAM
guucccucccuuguccuccu

SEQ ID NO: 37684 - RNA, 20 nt, Artificial Sequence
  spacer sequence TTCN PAM
ucuuggguuuaguggugagc

SEQ ID NO: 37685 - RNA, 20 nt, Artificial Sequence
  spacer sequence TTCN PAM
uuuuccucuuggguuuagug

SEQ ID NO: 37686 - RNA, 20 nt, Artificial Sequence
  spacer sequence TTCN PAM
uggcagaguccaauuuaaag

SEQ ID NO: 37687 - RNA, 20 nt, Artificial Sequence
  spacer sequence TTCN PAM
cacauuguuuguuuguugac

SEQ ID NO: 37688 - RNA, 20 nt, Artificial Sequence
  spacer sequence TTCN PAM
cuccuucccacauuguuugu

SEQ ID NO: 37689 - RNA, 20 nt, Artificial Sequence
  spacer sequence TTCN PAM
uucucuccuucccacauugu

SEQ ID NO: 37690 - RNA, 20 nt, Artificial Sequence
  spacer sequence TTCN PAM
ugggauuccuucucuccuuc

SEQ ID NO: 37691 - RNA, 20 nt, Artificial Sequence
  spacer sequence TTCN PAM
cgccggguccaggguggccc

SEQ ID NO: 37692 - RNA, 20 nt, Artificial Sequence
  spacer sequence TTCN PAM
auuucucgccggguccaggg

SEQ ID NO: 37693 - RNA, 20 nt, Artificial Sequence
  spacer sequence TTCN PAM
ugcaggguugucugguuugc

SEQ ID NO: 37694 - RNA, 20 nt, Artificial Sequence
  spacer sequence TTCN PAM
agcacaguuccugcaggguu

SEQ ID NO: 37695 - RNA, 20 nt, Artificial Sequence
  spacer sequence TTCN PAM
ucaagcacaguuccugcagg

SEQ ID NO: 37696 - RNA, 20 nt, Artificial Sequence
  spacer sequence TTCN PAM
acgguuucuucaagcacagu

SEQ ID NO: 37697 - RNA, 20 nt, Artificial Sequence
  spacer sequence TTCN PAM
uucucuguuuuauuaucuca

SEQ ID NO: 37698 - RNA, 20 nt, Artificial Sequence
  spacer sequence TTCN PAM
cuguuuuauuaucucauucu

SEQ ID NO: 37699 - RNA, 20 nt, Artificial Sequence
  spacer sequence TTCN PAM
uggcugugagguaaacagga

SEQ ID NO: 37700 - RNA, 20 nt, Artificial Sequence
  spacer sequence TTCN PAM
ccuguuuaccucacagccaa

SEQ ID NO: 37701 - RNA, 20 nt, Artificial Sequence
  spacer sequence TTCN PAM
cauuuucuccuguuuaccuc

SEQ ID NO: 37702 - RNA, 20 nt, Artificial Sequence
  spacer sequence TTCN PAM
ggaggacccgaccgaauuug

SEQ ID NO: 37703 - RNA, 20 nt, Artificial Sequence
  spacer sequence TTCN PAM
gucggguccuccagaaccac

SEQ ID NO: 37704 - RNA, 20 nt, Artificial Sequence
  spacer sequence TTCN PAM
ugacagggucaagcgcccuu

SEQ ID NO: 37705 - RNA, 20 nt, Artificial Sequence
  spacer sequence TTCN PAM
ucgccggccgcagcccucac

SEQ ID NO: 37706 - RNA, 20 nt, Artificial Sequence
  spacer sequence TTCN PAM
ggaccccuguccggaggccc

SEQ ID NO: 37707 - RNA, 20 nt, Artificial Sequence
  spacer sequence TTCN PAM
aaaccuucaggaccccuguc

SEQ ID NO: 37708 - RNA, 20 nt, Artificial Sequence
  spacer sequence TTCN PAM
aucucuggggguacaggaac

SEQ ID NO: 37709 - RNA, 20 nt, Artificial Sequence
  spacer sequence TTCN PAM
uguacccccagagauugaac

SEQ ID NO: 37710 - RNA, 20 nt, Artificial Sequence
  spacer sequence TTCN PAM
aaggcaagaguuucgcagag

SEQ ID NO: 37711 - RNA, 20 nt, Artificial Sequence
  spacer sequence TTCN PAM
cagagagaaaaaaaccauga

SEQ ID NO: 37712 - RNA, 20 nt, Artificial Sequence
  spacer sequence TTCN PAM
cucugcgaaacucuugccuu

SEQ ID NO: 37713 - RNA, 20 nt, Artificial Sequence
  spacer sequence TTCN PAM
ugguuuuuuucucucugcga

SEQ ID NO: 37714 - RNA, 20 nt, Artificial Sequence
  spacer sequence TTCN PAM
gccaccaaccugcaaaguuc

SEQ ID NO: 37715 - RNA, 20 nt, Artificial Sequence
  spacer sequence TTCN PAM
uaaaucaccagauuccgcca

SEQ ID NO: 37716 - RNA, 20 nt, Artificial Sequence
  spacer sequence TTCN PAM
ggaauucucuacaauaucug

SEQ ID NO: 37717 - RNA, 20 nt, Artificial Sequence
  spacer sequence TTCN PAM
ggaagagcaccgcagacagc

SEQ ID NO: 37718 - RNA, 20 nt, Artificial Sequence
  spacer sequence TTCN PAM
cuacaauaucuggaagugac

SEQ ID NO: 37719 - RNA, 20 nt, Artificial Sequence
  spacer sequence TTCN PAM
agauauuguagagaauuccg

SEQ ID NO: 37720 - RNA, 20 nt, Artificial Sequence
  spacer sequence TTCN PAM
uggucacuuccagauauugu

SEQ ID NO: 37721 - RNA, 20 nt, Artificial Sequence
  spacer sequence TTCN PAM
agaacccggaggcugcgccg

SEQ ID NO: 37722 - RNA, 20 nt, Artificial Sequence
  spacer sequence TTCN PAM
ggaauuuucuuggucacuuc

SEQ ID NO: 37723 - RNA, 20 nt, Artificial Sequence
  spacer sequence TTCN PAM
uuuuuuuugcuugugauaaa

SEQ ID NO: 37724 - RNA, 20 nt, Artificial Sequence
  spacer sequence TTCN PAM
gggcagcuuccuuuuuuuug

SEQ ID NO: 37725 - RNA, 20 nt, Artificial Sequence
  spacer sequence TTCN PAM
auccaucaccccuggauuuc

SEQ ID NO: 37726 - RNA, 20 nt, Artificial Sequence
  spacer sequence TTCN PAM
agaauuuuccucuaggaaga

SEQ ID NO: 37727 - RNA, 20 nt, Artificial Sequence
  spacer sequence TTCN PAM
agaauccguugggccacugc

SEQ ID NO: 37728 - RNA, 20 nt, Artificial Sequence
  spacer sequence TTCN PAM
ucuaggaagaugcccgggaa

SEQ ID NO: 37729 - RNA, 20 nt, Artificial Sequence
  spacer sequence TTCN PAM
uagaggaaaauucuagaauc

SEQ ID NO: 37730 - RNA, 20 nt, Artificial Sequence
  spacer sequence TTCN PAM
cgggcaucuuccuagaggaa

SEQ ID NO: 37731 - RNA, 20 nt, Artificial Sequence
  spacer sequence TTCN PAM
gggucgagccaacaggguua

SEQ ID NO: 37732 - RNA, 20 nt, Artificial Sequence
  spacer sequence TTCN PAM
cugccaccccgagcuucugg

SEQ ID NO: 37733 - RNA, 20 nt, Artificial Sequence
  spacer sequence TTCN PAM
uuccuuccuuccuuccuucc

SEQ ID NO: 37734 - RNA, 20 nt, Artificial Sequence
  spacer sequence TTCN PAM
uuccuuccuuccuuccugga

SEQ ID NO: 37735 - RNA, 20 nt, Artificial Sequence
  spacer sequence TTCN PAM
uuccuuccuuccuggaauuu

SEQ ID NO: 37736 - RNA, 20 nt, Artificial Sequence
  spacer sequence TTCN PAM
uuccuuccuggaauuucgcu

SEQ ID NO: 37737 - RNA, 20 nt, Artificial Sequence
  spacer sequence TTCN PAM
uuccuggaauuucgcucugu

SEQ ID NO: 37738 - RNA, 20 nt, Artificial Sequence
  spacer sequence TTCN PAM
uggaauuucgcucuguugcc

SEQ ID NO: 37739 - RNA, 20 nt, Artificial Sequence
  spacer sequence TTCN PAM
aggaaggaaggaaggaagga

SEQ ID NO: 37740 - RNA, 20 nt, Artificial Sequence
  spacer sequence TTCN PAM
cucuguugcccaggcuggag

SEQ ID NO: 37741 - RNA, 20 nt, Artificial Sequence
  spacer sequence TTCN PAM
cucuugucgcccaggcugga

SEQ ID NO: 37742 - RNA, 20 nt, Artificial Sequence
  spacer sequence TTCN PAM
gcucaccacaaccuccgccu

SEQ ID NO: 37743 - RNA, 20 nt, Artificial Sequence
  spacer sequence TTCN PAM
accugggaggcggagguugu

SEQ ID NO: 37744 - RNA, 20 nt, Artificial Sequence
  spacer sequence TTCN PAM
ccugccucagccucccaagu

SEQ ID NO: 37745 - RNA, 20 nt, Artificial Sequence
  spacer sequence TTCN PAM
ccauguuagccaggcugguc

SEQ ID NO: 37746 - RNA, 20 nt, Artificial Sequence
  spacer sequence TTCN PAM
agaccagccuggcuaacaug

SEQ ID NO: 37747 - RNA, 20 nt, Artificial Sequence
  spacer sequence TTCN PAM
caaauugcugggauuacaag

SEQ ID NO: 37748 - RNA, 20 nt, Artificial Sequence
  spacer sequence TTCN PAM
agugauuguccugccucagc

SEQ ID NO: 37749 - RNA, 20 nt, Artificial Sequence
  spacer sequence TTCN PAM
cggguucaagugauuguccu

SEQ ID NO: 37750 - RNA, 20 nt, Artificial Sequence
  spacer sequence TTCN PAM
cccucugucgcccaggggca

SEQ ID NO: 37751 - RNA, 20 nt, Artificial Sequence
  spacer sequence TTCN PAM
ggauggggucucgccacguu

SEQ ID NO: 37752 - RNA, 20 nt, Artificial Sequence
  spacer sequence TTCN PAM
agaccagccugggcaacgug

SEQ ID NO: 37753 - RNA, 20 nt, Artificial Sequence
  spacer sequence TTCN PAM
cucaccucgacaucccaggu

SEQ ID NO: 37754 - RNA, 20 nt, Artificial Sequence
  spacer sequence TTCN PAM
ucuuguuugucaggcucugc

SEQ ID NO: 37755 - RNA, 20 nt, Artificial Sequence
  spacer sequence TTCN PAM
uguuugucaggcucugcugu

SEQ ID NO: 37756 - RNA, 20 nt, Artificial Sequence
  spacer sequence TTCN PAM
uaucacaacagcagagccug

SEQ ID NO: 37757 - RNA, 20 nt, Artificial Sequence
  spacer sequence TTCN PAM
aaggggcggcuggugugcgg

SEQ ID NO: 37758 - RNA, 20 nt, Artificial Sequence
  spacer sequence TTCN PAM
acacaugccaacagcaccuc

SEQ ID NO: 37759 - RNA, 20 nt, Artificial Sequence
  spacer sequence TTCN PAM
cccugcacguccccaggaag

SEQ ID NO: 37760 - RNA, 20 nt, Artificial Sequence
  spacer sequence TTCN PAM
uggggacgugcagggggaac

SEQ ID NO: 37761 - RNA, 20 nt, Artificial Sequence
  spacer sequence TTCN PAM
uuccuggggacgugcagggg

SEQ ID NO: 37762 - RNA, 20 nt, Artificial Sequence
  spacer sequence TTCN PAM
gcugguccagcaguuccuuc

SEQ ID NO: 37763 - RNA, 20 nt, Artificial Sequence
  spacer sequence TTCN PAM
agaugcaggagcugguagcu

SEQ ID NO: 37764 - RNA, 20 nt, Artificial Sequence
  spacer sequence TTCN PAM
uccuccuggucaucuuccag

SEQ ID NO: 37765 - RNA, 20 nt, Artificial Sequence
  spacer sequence TTCN PAM
aagugauguuuccaggccgg

SEQ ID NO: 37766 - RNA, 20 nt, Artificial Sequence
  spacer sequence TTCN PAM
aggccgggcgcgcuuguaau

SEQ ID NO: 37767 - RNA, 20 nt, Artificial Sequence
  spacer sequence TTCN PAM
agaccagccugaccaacgug

SEQ ID NO: 37768 - RNA, 20 nt, Artificial Sequence
  spacer sequence TTCN PAM
ccacguuggucaggcugguc

SEQ ID NO: 37769 - RNA, 20 nt, Artificial Sequence
  spacer sequence TTCN PAM
ccugccucagccucccgagu

SEQ ID NO: 37770 - RNA, 20 nt, Artificial Sequence
  spacer sequence TTCN PAM
agcgauucuccugccucagc

SEQ ID NO: 37771 - RNA, 20 nt, Artificial Sequence
  spacer sequence TTCN PAM
cagacuuguguggcccaaca

SEQ ID NO: 37772 - RNA, 20 nt, Artificial Sequence
  spacer sequence TTCN PAM
aacacaucagggaauaaaug

SEQ ID NO: 37773 - RNA, 20 nt, Artificial Sequence
  spacer sequence TTCN PAM
cugauguguuugaaaacuaa

SEQ ID NO: 37774 - RNA, 20 nt, Artificial Sequence
  spacer sequence TTCN PAM
uaagugguccucaagacuuu

SEQ ID NO: 37775 - RNA, 20 nt, Artificial Sequence
  spacer sequence TTCN PAM
uuucuuaagugguccucaag

SEQ ID NO: 37776 - RNA, 20 nt, Artificial Sequence
  spacer sequence TTCN PAM
ggguuuuuuuuauucuuuuu

SEQ ID NO: 37777 - RNA, 20 nt, Artificial Sequence
  spacer sequence TTCN PAM
uuuuuguuguuguuuucauu

SEQ ID NO: 37778 - RNA, 20 nt, Artificial Sequence
  spacer sequence TTCN PAM
uuuuaucuuucuuuuccuau

SEQ ID NO: 37779 - RNA, 20 nt, Artificial Sequence
  spacer sequence TTCN PAM
uuuccuauuuauuuagagac

SEQ ID NO: 37780 - RNA, 20 nt, Artificial Sequence
  spacer sequence TTCN PAM
uauuuauuuagagacagggu

SEQ ID NO: 37781 - RNA, 20 nt, Artificial Sequence
  spacer sequence TTCN PAM
ccauguugcccaggcugguc

SEQ ID NO: 37782 - RNA, 20 nt, Artificial Sequence
  spacer sequence TTCN PAM
gaccagccugggcaacaugg

SEQ ID NO: 37783 - RNA, 20 nt, Artificial Sequence
  spacer sequence TTCN PAM
uccuguaaucccagcacacu

SEQ ID NO: 37784 - RNA, 20 nt, Artificial Sequence
  spacer sequence TTCN PAM
ggcuggucacaguggcuucc

SEQ ID NO: 37785 - RNA, 20 nt, Artificial Sequence
  spacer sequence TTCN PAM
uuuuuaaauuuuuaauagag

SEQ ID NO: 37786 - RNA, 20 nt, Artificial Sequence
  spacer sequence TTCN PAM
gaccagccugggugacauag

SEQ ID NO: 37787 - RNA, 20 nt, Artificial Sequence
  spacer sequence TTCN PAM
ugcuauaaacuauugaugcc

SEQ ID NO: 37788 - RNA, 20 nt, Artificial Sequence
  spacer sequence TTCN PAM
cuguaaugaagcccggggca

SEQ ID NO: 37789 - RNA, 20 nt, Artificial Sequence
  spacer sequence TTCN PAM
uuacagggaacccaggacac

SEQ ID NO: 37790 - RNA, 20 nt, Artificial Sequence
  spacer sequence TTCN PAM
uucuaggccugguucccucc

SEQ ID NO: 37791 - RNA, 20 nt, Artificial Sequence
  spacer sequence TTCN PAM
aggccugguucccuccaaaa

SEQ ID NO: 37792 - RNA, 20 nt, Artificial Sequence
  spacer sequence TTCN PAM
cuccaaaauuagcuuccuau

SEQ ID NO: 37793 - RNA, 20 nt, Artificial Sequence
  spacer sequence TTCN PAM
uaucgggaucccacaucccc

SEQ ID NO: 37794 - RNA, 20 nt, Artificial Sequence
  spacer sequence TTCN PAM
aauaauaauucuccugccuc

SEQ ID NO: 37795 - RNA, 20 nt, Artificial Sequence
  spacer sequence TTCN PAM
ccugccucagccucccgagu

SEQ ID NO: 37796 - RNA, 20 nt, Artificial Sequence
  spacer sequence TTCN PAM
agaccagccuggccaacagg

SEQ ID NO: 37797 - RNA, 20 nt, Artificial Sequence
  spacer sequence TTCN PAM
accugccauggauaaaacgc

SEQ ID NO: 37798 - RNA, 20 nt, Artificial Sequence
  spacer sequence TTCN PAM
agaggacacuggagacagag

SEQ ID NO: 37799 - RNA, 20 nt, Artificial Sequence
  spacer sequence TTCN PAM
ccagaacaaggccugggcgc

SEQ ID NO: 37800 - RNA, 20 nt, Artificial Sequence
  spacer sequence TTCN PAM
ggggaacacucugucuccag

SEQ ID NO: 37801 - RNA, 20 nt, Artificial Sequence
  spacer sequence TTCN PAM
cucucccuauggagacaucu

SEQ ID NO: 37802 - RNA, 20 nt, Artificial Sequence
  spacer sequence TTCN PAM
uuuuaauaaauuuugcaagg

SEQ ID NO: 37803 - RNA, 20 nt, Artificial Sequence
  spacer sequence TTCN PAM
uccugcggggacuuaggcca

SEQ ID NO: 37804 - RNA, 20 nt, Artificial Sequence
  spacer sequence TTCN PAM
ggggccugcugggaccaggu

SEQ ID NO: 37805 - RNA, 20 nt, Artificial Sequence
  spacer sequence TTCN PAM
ggccuccagagacgagagug

SEQ ID NO: 37806 - RNA, 20 nt, Artificial Sequence
  spacer sequence TTCN PAM
gacuuccggccuccagagac

SEQ ID NO: 37807 - RNA, 20 nt, Artificial Sequence
  spacer sequence TTCN PAM
cuucagacuuccggccucca

SEQ ID NO: 37808 - RNA, 20 nt, Artificial Sequence
  spacer sequence TTCN PAM
agcuccuggugccgacagcc

SEQ ID NO: 37809 - RNA, 20 nt, Artificial Sequence
  spacer sequence TTCN PAM
cucccaauucugccucugcu

SEQ ID NO: 37810 - RNA, 20 nt, Artificial Sequence
  spacer sequence TTCN PAM
gccucugcugccccacggcg

SEQ ID NO: 37811 - RNA, 20 nt, Artificial Sequence
  spacer sequence TTCN PAM
cuugucucccgaagucgccu

SEQ ID NO: 37812 - RNA, 20 nt, Artificial Sequence
  spacer sequence TTCN PAM
ggagacaagggaaauuugga

SEQ ID NO: 37813 - RNA, 20 nt, Artificial Sequence
  spacer sequence TTCN PAM
gcagauguaauuaguuagga

SEQ ID NO: 37814 - RNA, 20 nt, Artificial Sequence
  spacer sequence TTCN PAM
acauaaggucccauuuguag

SEQ ID NO: 37815 - RNA, 20 nt, Artificial Sequence
  spacer sequence TTCN PAM
cgcaaagacagaucuuugag

SEQ ID NO: 37816 - RNA, 20 nt, Artificial Sequence
  spacer sequence TTCN PAM
cucaaagaucugucuuugcg

SEQ ID NO: 37817 - RNA, 20 nt, Artificial Sequence
  spacer sequence TTCN PAM
ccccaccccggggaguuugc

SEQ ID NO: 37818 - RNA, 20 nt, Artificial Sequence
  spacer sequence TTCN PAM
cccucagaucaaauucugcc

SEQ ID NO: 37819 - RNA, 20 nt, Artificial Sequence
  spacer sequence TTCN PAM
gccuccucagcgaggccuuc

SEQ ID NO: 37820 - RNA, 20 nt, Artificial Sequence
  spacer sequence TTCN PAM
ugacccucccgggcccuucc

SEQ ID NO: 37821 - RNA, 20 nt, Artificial Sequence
  spacer sequence TTCN PAM
ugccuuucucucuggcugcg

SEQ ID NO: 37822 - RNA, 20 nt, Artificial Sequence
  spacer sequence TTCN PAM
cucuggcugcggcuguuucc

SEQ ID NO: 37823 - RNA, 20 nt, Artificial Sequence
  spacer sequence TTCN PAM
ugcggggcuggcugcagcuc

SEQ ID NO: 37824 - RNA, 20 nt, Artificial Sequence
  spacer sequence TTCN PAM
uguccaucgucggcaacccc

SEQ ID NO: 37825 - RNA, 20 nt, Artificial Sequence
  spacer sequence TTCN PAM
aacacagcucauugcccgca

SEQ ID NO: 37826 - RNA, 20 nt, Artificial Sequence
  spacer sequence TTCN PAM
gacggagacgcagggccuac

SEQ ID NO: 37827 - RNA, 20 nt, Artificial Sequence
  spacer sequence TTCN PAM
gucaagugaccacccacagc

SEQ ID NO: 37828 - RNA, 20 nt, Artificial Sequence
  spacer sequence TTCN PAM
uuauuuguuuauuugcuuuu

SEQ ID NO: 37829 - RNA, 20 nt, Artificial Sequence
  spacer sequence TTCN PAM
guugcuuuagagacuggauu

SEQ ID NO: 37830 - RNA, 20 nt, Artificial Sequence
  spacer sequence TTCN PAM
ccacugcacuccagccugga

SEQ ID NO: 37831 - RNA, 20 nt, Artificial Sequence
  spacer sequence TTCN PAM
cugcagccuccaucuccugg

SEQ ID NO: 37832 - RNA, 20 nt, Artificial Sequence
  spacer sequence TTCN PAM
ggaggcuaaggccguagucu

SEQ ID NO: 37833 - RNA, 20 nt, Artificial Sequence
  spacer sequence TTCN PAM
uugacuuuuguuuauacagg

SEQ ID NO: 37834 - RNA, 20 nt, Artificial Sequence
  spacer sequence TTCN PAM
aaguccuggccucaagcaau

SEQ ID NO: 37835 - RNA, 20 nt, Artificial Sequence
  spacer sequence TTCN PAM
ggagggcgaggcacgaggau

SEQ ID NO: 37836 - RNA, 20 nt, Artificial Sequence
  spacer sequence TTCN PAM
ugccuauaaucccaucacuu

SEQ ID NO: 37837 - RNA, 20 nt, Artificial Sequence
  spacer sequence TTCN PAM
cuccauccuuuccuuuuuuu

SEQ ID NO: 37838 - RNA, 20 nt, Artificial Sequence
  spacer sequence TTCN PAM
uuuuuuuuuuuuuuugagac

SEQ ID NO: 37839 - RNA, 20 nt, Artificial Sequence
  spacer sequence TTCN PAM
agcgauucuccugccucagc

SEQ ID NO: 37840 - RNA, 20 nt, Artificial Sequence
  spacer sequence TTCN PAM
ccugccucagccucccgagu

SEQ ID NO: 37841 - RNA, 20 nt, Artificial Sequence
  spacer sequence TTCN PAM
ggcgaucugccugccucggg

SEQ ID NO: 37842 - RNA, 20 nt, Artificial Sequence
  spacer sequence TTCN PAM
ggagcccgaggcaggcagau

SEQ ID NO: 37843 - RNA, 20 nt, Artificial Sequence
  spacer sequence TTCN PAM
aggcuguaguuagcugggau

SEQ ID NO: 37844 - RNA, 20 nt, Artificial Sequence
  spacer sequence TTCN PAM
ccauguuggccaggcugguc

SEQ ID NO: 37845 - RNA, 20 nt, Artificial Sequence
  spacer sequence TTCN PAM
ccugccucagagucccaagg

SEQ ID NO: 37846 - RNA, 20 nt, Artificial Sequence
  spacer sequence TTCN PAM
aucaauucuccugccucaga

SEQ ID NO: 37847 - RNA, 20 nt, Artificial Sequence
  spacer sequence TTCN PAM
cugcaaccucugccuccugg

SEQ ID NO: 37848 - RNA, 20 nt, Artificial Sequence
  spacer sequence TTCN PAM
agacagaguuuggcucuugc

SEQ ID NO: 37849 - RNA, 20 nt, Artificial Sequence
  spacer sequence TTCN PAM
gugucuggcgucucucacgg

SEQ ID NO: 37850 - RNA, 20 nt, Artificial Sequence
  spacer sequence TTCN PAM
cgcugaguuguguuccgcgg

SEQ ID NO: 37851 - RNA, 20 nt, Artificial Sequence
  spacer sequence TTCN PAM
gcgguggacggccggcacug

SEQ ID NO: 37852 - RNA, 20 nt, Artificial Sequence
  spacer sequence TTCN PAM
uccacuaacgggaauuuggg

SEQ ID NO: 37853 - RNA, 20 nt, Artificial Sequence
  spacer sequence TTCN PAM
acuaacgggaauuugggcug

SEQ ID NO: 37854 - RNA, 20 nt, Artificial Sequence
  spacer sequence TTCN PAM
cguuaguggaagaaaagacc

SEQ ID NO: 37855 - RNA, 20 nt, Artificial Sequence
  spacer sequence TTCN PAM
acauguggccuccgugaaua

SEQ ID NO: 37856 - RNA, 20 nt, Artificial Sequence
  spacer sequence TTCN PAM
cggaggccacauguggaaac

SEQ ID NO: 37857 - RNA, 20 nt, Artificial Sequence
  spacer sequence TTCN PAM
ucguaguguuauucacggag

SEQ ID NO: 37858 - RNA, 20 nt, Artificial Sequence
  spacer sequence TTCN PAM
uguacgcguuucugugugga

SEQ ID NO: 37859 - RNA, 20 nt, Artificial Sequence
  spacer sequence TTCN PAM
guguggacuuguguuucccc

SEQ ID NO: 37860 - RNA, 20 nt, Artificial Sequence
  spacer sequence TTCN PAM
ccuucucucaggggcaugaa

SEQ ID NO: 37861 - RNA, 20 nt, Artificial Sequence
  spacer sequence TTCN PAM
cucaggggcaugaauaggag

SEQ ID NO: 37862 - RNA, 20 nt, Artificial Sequence
  spacer sequence TTCN PAM
ugccccugagagaaggggaa

SEQ ID NO: 37863 - RNA, 20 nt, Artificial Sequence
  spacer sequence TTCN PAM
ccuccuauucaugccccuga

SEQ ID NO: 37864 - RNA, 20 nt, Artificial Sequence
  spacer sequence TTCN PAM
ugagggccggcccccagugc

SEQ ID NO: 37865 - RNA, 20 nt, Artificial Sequence
  spacer sequence TTCN PAM
agcaauucuccugccucagu

SEQ ID NO: 37866 - RNA, 20 nt, Artificial Sequence
  spacer sequence TTCN PAM
ccugccucagucucccgagg

SEQ ID NO: 37867 - RNA, 20 nt, Artificial Sequence
  spacer sequence TTCN PAM
ccauguuggccaggcugauc

SEQ ID NO: 37868 - RNA, 20 nt, Artificial Sequence
  spacer sequence TTCN PAM
agaucagccuggccaacaug

SEQ ID NO: 37869 - RNA, 20 nt, Artificial Sequence
  spacer sequence TTCN PAM
aaagagggugcugaggugcg

SEQ ID NO: 37870 - RNA, 20 nt, Artificial Sequence
  spacer sequence TTCN PAM
uagcaaguucucugccugag

SEQ ID NO: 37871 - RNA, 20 nt, Artificial Sequence
  spacer sequence TTCN PAM
cugccugaguucagacccac

SEQ ID NO: 37872 - RNA, 20 nt, Artificial Sequence
  spacer sequence TTCN PAM
gacccacagggccucuuagg

SEQ ID NO: 37873 - RNA, 20 nt, Artificial Sequence
  spacer sequence TTCN PAM
gcuagagcugggcccugacc

SEQ ID NO: 37874 - RNA, 20 nt, Artificial Sequence
  spacer sequence TTCN PAM
gcuagagcugggcccugauc

SEQ ID NO: 37875 - RNA, 20 nt, Artificial Sequence
  spacer sequence TTCN PAM
gcuggagcugggcccugacc

SEQ ID NO: 37876 - RNA, 20 nt, Artificial Sequence
  spacer sequence TTCN PAM
ccaccccacccaggggaguu

SEQ ID NO: 37877 - RNA, 20 nt, Artificial Sequence
  spacer sequence TTCN PAM
gugcuccccuccccagccug

SEQ ID NO: 37878 - RNA, 20 nt, Artificial Sequence
  spacer sequence TTCN PAM
ccaccccauccgccucuccc

SEQ ID NO: 37879 - RNA, 20 nt, Artificial Sequence
  spacer sequence TTCN PAM
uguuggccugagggcccagg

SEQ ID NO: 37880 - RNA, 20 nt, Artificial Sequence
  spacer sequence TTCN PAM
caucccaggacaccucccua

SEQ ID NO: 37881 - RNA, 20 nt, Artificial Sequence
  spacer sequence TTCN PAM
caagagucuucucaucccag

SEQ ID NO: 37882 - RNA, 20 nt, Artificial Sequence
  spacer sequence TTCN PAM
ggggcagauccuugggccca

SEQ ID NO: 37883 - RNA, 20 nt, Artificial Sequence
  spacer sequence TTCN PAM
uggggugggggaugaacaga

SEQ ID NO: 37884 - RNA, 20 nt, Artificial Sequence
  spacer sequence TTCN PAM
ucccccaccccaagaaggac

SEQ ID NO: 37885 - RNA, 20 nt, Artificial Sequence
  spacer sequence TTCN PAM
cccccacccucuccagucuc

SEQ ID NO: 37886 - RNA, 20 nt, Artificial Sequence
  spacer sequence TTCN PAM
gugucuacaaaacauuuuuu

SEQ ID NO: 37887 - RNA, 20 nt, Artificial Sequence
  spacer sequence TTCN PAM
accacgccuggcucauuuua

SEQ ID NO: 37888 - RNA, 20 nt, Artificial Sequence
  spacer sequence TTCN PAM
cuuuaggaucucuacuuccu

SEQ ID NO: 37889 - RNA, 20 nt, Artificial Sequence
  spacer sequence TTCN PAM
uauaccaacccacuguccca

SEQ ID NO: 37890 - RNA, 20 nt, Artificial Sequence
  spacer sequence TTCN PAM
cagagcacagagcacaggac

SEQ ID NO: 37891 - RNA, 20 nt, Artificial Sequence
  spacer sequence TTCN PAM
guccugugcucugugcucug

SEQ ID NO: 37892 - RNA, 20 nt, Artificial Sequence
  spacer sequence TTCN PAM
gcaugggguauagugaggcc

SEQ ID NO: 37893 - RNA, 20 nt, Artificial Sequence
  spacer sequence TTCN PAM
cuggccucacuauaccccau

SEQ ID NO: 37894 - RNA, 20 nt, Artificial Sequence
  spacer sequence TTCN PAM
uguccgugaguccuggccau

SEQ ID NO: 37895 - RNA, 20 nt, Artificial Sequence
  spacer sequence TTCN PAM
gugaggccaccccaaggccu

SEQ ID NO: 37896 - RNA, 20 nt, Artificial Sequence
  spacer sequence TTCN PAM
acagaaauccaggaaauggg

SEQ ID NO: 37897 - RNA, 20 nt, Artificial Sequence
  spacer sequence TTCN PAM
guugaacggagcuuggagug

SEQ ID NO: 37898 - RNA, 20 nt, Artificial Sequence
  spacer sequence TTCN PAM
uggauuucuguugaacggag

SEQ ID NO: 37899 - RNA, 20 nt, Artificial Sequence
  spacer sequence TTCN PAM
agaccagccuggccaacaca

SEQ ID NO: 37900 - RNA, 20 nt, Artificial Sequence
  spacer sequence TTCN PAM
cuguguuggccaggcugguc

SEQ ID NO: 37901 - RNA, 20 nt, Artificial Sequence
  spacer sequence TTCN PAM
gcauguuggccaggaugguc

SEQ ID NO: 37902 - RNA, 20 nt, Artificial Sequence
  spacer sequence TTCN PAM
agcgagucuccugccucagc

SEQ ID NO: 37903 - RNA, 20 nt, Artificial Sequence
  spacer sequence TTCN PAM
ucaacaugaguggcagggcc

SEQ ID NO: 37904 - RNA, 20 nt, Artificial Sequence
  spacer sequence TTCN PAM
ucgucaacaugaguggcagg

SEQ ID NO: 37905 - RNA, 20 nt, Artificial Sequence
  spacer sequence TTCN PAM
cucccccaucagaacugaaa

SEQ ID NO: 37906 - RNA, 20 nt, Artificial Sequence
  spacer sequence TTCN PAM
gaugggggagggaagggccg

SEQ ID NO: 37907 - RNA, 20 nt, Artificial Sequence
  spacer sequence TTCN PAM
guucugaugggggagggaag

SEQ ID NO: 37908 - RNA, 20 nt, Artificial Sequence
  spacer sequence TTCN PAM
ccugccaggcucagaguauc

SEQ ID NO: 37909 - RNA, 20 nt, Artificial Sequence
  spacer sequence TTCN PAM
aaaugguaaccagcaaacca

SEQ ID NO: 37910 - RNA, 20 nt, Artificial Sequence
  spacer sequence TTCN PAM
cgcacaaaggcaaggugagc

SEQ ID NO: 37911 - RNA, 20 nt, Artificial Sequence
  spacer sequence TTCN PAM
ucgcucacccugaaucauuc

SEQ ID NO: 37912 - RNA, 20 nt, Artificial Sequence
  spacer sequence TTCN PAM
gggugagcgaggaacaggcu

SEQ ID NO: 37913 - RNA, 20 nt, Artificial Sequence
  spacer sequence TTCN PAM
ugaaggaggcagcuggccug

SEQ ID NO: 37914 - RNA, 20 nt, Artificial Sequence
  spacer sequence TTCN PAM
ugaaugauucagggugagcg

SEQ ID NO: 37915 - RNA, 20 nt, Artificial Sequence
  spacer sequence TTCN PAM
ccucuccugucucccauccc

SEQ ID NO: 37916 - RNA, 20 nt, Artificial Sequence
  spacer sequence TTCN PAM
cgcgcuggcguucugcauau

SEQ ID NO: 37917 - RNA, 20 nt, Artificial Sequence
  spacer sequence TTCN PAM
gcauaugacagcugaccugu

SEQ ID NO: 37918 - RNA, 20 nt, Artificial Sequence
  spacer sequence TTCN PAM
cccgccucagucucccgagu

SEQ ID NO: 37919 - RNA, 20 nt, Artificial Sequence
  spacer sequence TTCN PAM
gaucguggccccgccaggcc

SEQ ID NO: 37920 - RNA, 20 nt, Artificial Sequence
  spacer sequence TTCN PAM
gaaggguuagacuggugcuu

SEQ ID NO: 37921 - RNA, 20 nt, Artificial Sequence
  spacer sequence TTCN PAM
gaaucguguuaaaacccacu

SEQ ID NO: 37922 - RNA, 20 nt, Artificial Sequence
  spacer sequence TTCN PAM
aagcaccagucuaacccuuc

SEQ ID NO: 37923 - RNA, 20 nt, Artificial Sequence
  spacer sequence TTCN PAM
gggcggggcccaucccaggc

SEQ ID NO: 37924 - RNA, 20 nt, Artificial Sequence
  spacer sequence TTCN PAM
cggagugccugggaugggcc

SEQ ID NO: 37925 - RNA, 20 nt, Artificial Sequence
  spacer sequence TTCN PAM
gucuguucgcggagugccug

SEQ ID NO: 37926 - RNA, 20 nt, Artificial Sequence
  spacer sequence TTCN PAM
gguggugugaggaugggggu

SEQ ID NO: 37927 - RNA, 20 nt, Artificial Sequence
  spacer sequence TTCN PAM
cccagauccaccggacauuc

SEQ ID NO: 37928 - RNA, 20 nt, Artificial Sequence
  spacer sequence TTCN PAM
ugaugagugacccuggcugc

SEQ ID NO: 37929 - RNA, 20 nt, Artificial Sequence
  spacer sequence TTCN PAM
ggccaaaggaccuugccgug

SEQ ID NO: 37930 - RNA, 20 nt, Artificial Sequence
  spacer sequence TTCN PAM
agcccggauuagggguggcc

SEQ ID NO: 37931 - RNA, 20 nt, Artificial Sequence
  spacer sequence TTCN PAM
ggccggggccuggcgugggc

SEQ ID NO: 37932 - RNA, 20 nt, Artificial Sequence
  spacer sequence TTCN PAM
agcagugcugcguuucaggc

SEQ ID NO: 37933 - RNA, 20 nt, Artificial Sequence
  spacer sequence TTCN PAM
cuggcguguuuuauuccagc

SEQ ID NO: 37934 - RNA, 20 nt, Artificial Sequence
  spacer sequence TTCN PAM
ccaaauccaggcgagccuag

SEQ ID NO: 37935 - RNA, 20 nt, Artificial Sequence
  spacer sequence TTCN PAM
cguuuccccaaauccaggcg

SEQ ID NO: 37936 - RNA, 20 nt, Artificial Sequence
  spacer sequence TTCN PAM
cccuccguagguugguguua

SEQ ID NO: 37937 - RNA, 20 nt, Artificial Sequence
  spacer sequence TTCN PAM
uuaacaccaaccuacggagg

SEQ ID NO: 37938 - RNA, 20 nt, Artificial Sequence
  spacer sequence TTCN PAM
gcauggacuaaaucccgcua

SEQ ID NO: 37939 - RNA, 20 nt, Artificial Sequence
  spacer sequence TTCN PAM
auuuagggagcagugucuac

SEQ ID NO: 37940 - RNA, 20 nt, Artificial Sequence
  spacer sequence TTCN PAM
cggcccggaguagacacugc

SEQ ID NO: 37941 - RNA, 20 nt, Artificial Sequence
  spacer sequence TTCN PAM
aaccgcagccucccgugagg

SEQ ID NO: 37942 - RNA, 20 nt, Artificial Sequence
  spacer sequence TTCN PAM
ugugaucagcgcuccuggga

SEQ ID NO: 37943 - RNA, 20 nt, Artificial Sequence
  spacer sequence TTCN PAM
caggagcgcugaucacauga

SEQ ID NO: 37944 - RNA, 20 nt, Artificial Sequence
  spacer sequence TTCN PAM
gcugcugggaugguggcccg

SEQ ID NO: 37945 - RNA, 20 nt, Artificial Sequence
  spacer sequence TTCN PAM
ccagccguaggcuggcagcc

SEQ ID NO: 37946 - RNA, 20 nt, Artificial Sequence
  spacer sequence TTCN PAM
aggcugccagccuacggcug

SEQ ID NO: 37947 - RNA, 20 nt, Artificial Sequence
  spacer sequence TTCN PAM
ccagcuguaggucagugggc

SEQ ID NO: 37948 - RNA, 20 nt, Artificial Sequence
  spacer sequence TTCN PAM
ccagcuguaggcggguggcu

SEQ ID NO: 37949 - RNA, 20 nt, Artificial Sequence
  spacer sequence TTCN PAM
ccaccuguaggcgggcggcc

SEQ ID NO: 37950 - RNA, 20 nt, Artificial Sequence
  spacer sequence TTCN PAM
ccagcuguaggcggauggcc

SEQ ID NO: 37951 - RNA, 20 nt, Artificial Sequence
  spacer sequence TTCN PAM
cccgcuguaggcagauggcc

SEQ ID NO: 37952 - RNA, 20 nt, Artificial Sequence
  spacer sequence TTCN PAM
ccagcuguaggcggauggcc

SEQ ID NO: 37953 - RNA, 20 nt, Artificial Sequence
  spacer sequence TTCN PAM
ccagcuuuaggcgguuggcc

SEQ ID NO: 37954 - RNA, 20 nt, Artificial Sequence
  spacer sequence TTCN PAM
ccagcuguaagcgggcggcc

SEQ ID NO: 37955 - RNA, 20 nt, Artificial Sequence
  spacer sequence TTCN PAM
ccagcuguaggugagaggcc

SEQ ID NO: 37956 - RNA, 20 nt, Artificial Sequence
  spacer sequence TTCN PAM
ccagcuguaggcgggcggcc

SEQ ID NO: 37957 - RNA, 20 nt, Artificial Sequence
  spacer sequence TTCN PAM
ccaccuguaggcgggcggcc

SEQ ID NO: 37958 - RNA, 20 nt, Artificial Sequence
  spacer sequence TTCN PAM
ccagcuguaggugagaggcc

SEQ ID NO: 37959 - RNA, 20 nt, Artificial Sequence
  spacer sequence TTCN PAM
ccagcuguaggcgggcggcc

SEQ ID NO: 37960 - RNA, 20 nt, Artificial Sequence
  spacer sequence TTCN PAM
ccagcuguaggcgggcggcc

SEQ ID NO: 37961 - RNA, 20 nt, Artificial Sequence
  spacer sequence TTCN PAM
cagcuguaggcagccggccg

SEQ ID NO: 37962 - RNA, 20 nt, Artificial Sequence
  spacer sequence TTCN PAM
cuaucuccgcagucgggauu

SEQ ID NO: 37963 - RNA, 20 nt, Artificial Sequence
  spacer sequence TTCN PAM
cuguuccggggcgaacaaag

SEQ ID NO: 37964 - RNA, 20 nt, Artificial Sequence
  spacer sequence TTCN PAM
ggggcgaacaaagaacgguc

SEQ ID NO: 37965 - RNA, 20 nt, Artificial Sequence
  spacer sequence TTCN PAM
ccccggaacagcgaaucccg

SEQ ID NO: 37966 - RNA, 20 nt, Artificial Sequence
  spacer sequence TTCN PAM
uuguucgccccggaacagcg

SEQ ID NO: 37967 - RNA, 20 nt, Artificial Sequence
  spacer sequence TTCN PAM
acaguggccacagauacugc

SEQ ID NO: 37968 - RNA, 20 nt, Artificial Sequence
  spacer sequence TTCN PAM
cuccccgcgcgaucacccag

SEQ ID NO: 37969 - RNA, 20 nt, Artificial Sequence
  spacer sequence TTCN PAM
aacugagcgcucacaucugg

SEQ ID NO: 37970 - RNA, 20 nt, Artificial Sequence
  spacer sequence TTCN PAM
ugcccgacuccaagauggcg

SEQ ID NO: 37971 - RNA, 20 nt, Artificial Sequence
  spacer sequence TTCN PAM
cgccgccugacucgccacgu

SEQ ID NO: 37972 - RNA, 20 nt, Artificial Sequence
  spacer sequence TTCN PAM
cccccucccccgacuacaca

SEQ ID NO: 37973 - RNA, 20 nt, Artificial Sequence
  spacer sequence TTCN PAM
gccuucggccuugaggaaua

SEQ ID NO: 37974 - RNA, 20 nt, Artificial Sequence
  spacer sequence TTCN PAM
gccuugaggaauaaccgccu

SEQ ID NO: 37975 - RNA, 20 nt, Artificial Sequence
  spacer sequence TTCN PAM
ucaaggccgaaggcggaaac

SEQ ID NO: 37976 - RNA, 20 nt, Artificial Sequence
  spacer sequence TTCN PAM
cugggucccgcccccgggcg

SEQ ID NO: 37977 - RNA, 20 nt, Artificial Sequence
  spacer sequence TTCN PAM
ggccagugggaggugcuggc

SEQ ID NO: 37978 - RNA, 20 nt, Artificial Sequence
  spacer sequence TTCN PAM
ugcuauuccggcgccuccac

SEQ ID NO: 37979 - RNA, 20 nt, Artificial Sequence
  spacer sequence TTCN PAM
ggcgccuccacuccgucccc

SEQ ID NO: 37980 - RNA, 20 nt, Artificial Sequence
  spacer sequence TTCN PAM
ucuccgcguggcgggcgcgg

SEQ ID NO: 37981 - RNA, 20 nt, Artificial Sequence
  spacer sequence TTCN PAM
cgggggucuggccgcguccc

SEQ ID NO: 37982 - RNA, 20 nt, Artificial Sequence
  spacer sequence TTCN PAM
ggcccccgcgcgccccgucc

SEQ ID NO: 37983 - RNA, 20 nt, Artificial Sequence
  spacer sequence TTCN PAM
ccuuugccccgccucggcgg

SEQ ID NO: 37984 - RNA, 20 nt, Artificial Sequence
  spacer sequence TTCN PAM
cgcuucccguccggcccucg

SEQ ID NO: 37985 - RNA, 20 nt, Artificial Sequence
  spacer sequence TTCN PAM
cguccggcccucgcgcgccc

SEQ ID NO: 37986 - RNA, 20 nt, Artificial Sequence
  spacer sequence TTCN PAM
cgccucccguccgcuccccu

SEQ ID NO: 37987 - RNA, 20 nt, Artificial Sequence
  spacer sequence TTCN PAM
cgccgcccggacucugcccc

SEQ ID NO: 37988 - RNA, 20 nt, Artificial Sequence
  spacer sequence TTCN PAM
ggggcugcgccgggggcaga

SEQ ID NO: 37989 - RNA, 20 nt, Artificial Sequence
  spacer sequence TTCN PAM
cucccggcggccgccccagc

SEQ ID NO: 37990 - RNA, 20 nt, Artificial Sequence
  spacer sequence TTCN PAM
gugaucucgggagagaagcg

SEQ ID NO: 37991 - RNA, 20 nt, Artificial Sequence
  spacer sequence TTCN PAM
cucccgagaucaccgaaacc

SEQ ID NO: 37992 - RNA, 20 nt, Artificial Sequence
  spacer sequence TTCN PAM
cggcucucgggccggggcag

SEQ ID NO: 37993 - RNA, 20 nt, Artificial Sequence
  spacer sequence TTCN PAM
gggcggcuuugcugggcggg

SEQ ID NO: 37994 - RNA, 20 nt, Artificial Sequence
  spacer sequence TTCN PAM
cuugggagaggugggagccc

SEQ ID NO: 37995 - RNA, 20 nt, Artificial Sequence
  spacer sequence TTCN PAM
ggagggggcucccaccucuc

SEQ ID NO: 37996 - RNA, 20 nt, Artificial Sequence
  spacer sequence TTCN PAM
ugcgcgaggcccucccuggg

SEQ ID NO: 37997 - RNA, 20 nt, Artificial Sequence
  spacer sequence TTCN PAM
cagggagggccucgcgcagg

SEQ ID NO: 37998 - RNA, 20 nt, Artificial Sequence
  spacer sequence TTCN PAM
uauucccagggagggccucg

SEQ ID NO: 37999 - RNA, 20 nt, Artificial Sequence
  spacer sequence TTCN PAM
cauucuuuccguuuuccuga

SEQ ID NO: 38000 - RNA, 20 nt, Artificial Sequence
  spacer sequence TTCN PAM
uuccguuuuccugagaaguu

SEQ ID NO: 38001 - RNA, 20 nt, Artificial Sequence
  spacer sequence TTCN PAM
guuuuccugagaaguuuuuc

SEQ ID NO: 38002 - RNA, 20 nt, Artificial Sequence
  spacer sequence TTCN PAM
ugagaaguuuuucuuggguu

SEQ ID NO: 38003 - RNA, 20 nt, Artificial Sequence
  spacer sequence TTCN PAM
caggaaaacggaaagaaugc

SEQ ID NO: 38004 - RNA, 20 nt, Artificial Sequence
  spacer sequence TTCN PAM
uggguucagucacuuuuaaa

SEQ ID NO: 38005 - RNA, 20 nt, Artificial Sequence
  spacer sequence TTCN PAM
gucacuuuuaaaagucuguu

SEQ ID NO: 38006 - RNA, 20 nt, Artificial Sequence
  spacer sequence TTCN PAM
gacaccacagacugcacgga

SEQ ID NO: 38007 - RNA, 20 nt, Artificial Sequence
  spacer sequence TTCN PAM
gacggacgcuccgagucacu

SEQ ID NO: 38008 - RNA, 20 nt, Artificial Sequence
  spacer sequence TTCN PAM
cccggccacugcaacucccg

SEQ ID NO: 38009 - RNA, 20 nt, Artificial Sequence
  spacer sequence TTCN PAM
gccccggccagguccugacc

SEQ ID NO: 38010 - RNA, 20 nt, Artificial Sequence
  spacer sequence TTCN PAM
auccaccuuccccccggggu

SEQ ID NO: 38011 - RNA, 20 nt, Artificial Sequence
  spacer sequence TTCN PAM
ccccggggugucccgaggag

SEQ ID NO: 38012 - RNA, 20 nt, Artificial Sequence
  spacer sequence TTCN PAM
ggucggucuguuaauuuuua

SEQ ID NO: 38013 - RNA, 20 nt, Artificial Sequence
  spacer sequence TTCN PAM
acggccgccuccugcucucc

SEQ ID NO: 38014 - RNA, 20 nt, Artificial Sequence
  spacer sequence TTCN PAM
acccggguaggggugggccc

SEQ ID NO: 38015 - RNA, 20 nt, Artificial Sequence
  spacer sequence TTCN PAM
gccucuccgaggcguuucca

SEQ ID NO: 38016 - RNA, 20 nt, Artificial Sequence
  spacer sequence TTCN PAM
aacuuacuggaaagcacaca

SEQ ID NO: 38017 - RNA, 20 nt, Artificial Sequence
  spacer sequence TTCN PAM
aguaaguuggaaacgccucg

SEQ ID NO: 38018 - RNA, 20 nt, Artificial Sequence
  spacer sequence TTCN PAM
agggcugcugugugcuuucc

SEQ ID NO: 38019 - RNA, 20 nt, Artificial Sequence
  spacer sequence TTCN PAM
ucggggcuuccgaugggggu

SEQ ID NO: 38020 - RNA, 20 nt, Artificial Sequence
  spacer sequence TTCN PAM
gaugggggugucuuugucuu

SEQ ID NO: 38021 - RNA, 20 nt, Artificial Sequence
  spacer sequence TTCN PAM
aagacaaagacacccccauc

SEQ ID NO: 38022 - RNA, 20 nt, Artificial Sequence
  spacer sequence TTCN PAM
aguugcagucaaguggacgg

SEQ ID NO: 38023 - RNA, 20 nt, Artificial Sequence
  spacer sequence TTCN PAM
cugcccuucugagcuuucuc

SEQ ID NO: 38024 - RNA, 20 nt, Artificial Sequence
  spacer sequence TTCN PAM
gagcuuucucuagcggggcc

SEQ ID NO: 38025 - RNA, 20 nt, Artificial Sequence
  spacer sequence TTCN PAM
cuagcggggccucgugcagc

SEQ ID NO: 38026 - RNA, 20 nt, Artificial Sequence
  spacer sequence TTCN PAM
uucucucuacagcauugucc

SEQ ID NO: 38027 - RNA, 20 nt, Artificial Sequence
  spacer sequence TTCN PAM
cucuacagcauugucccaga

SEQ ID NO: 38028 - RNA, 20 nt, Artificial Sequence
  spacer sequence TTCN PAM
cacuuugcuucuccgugacg

SEQ ID NO: 38029 - RNA, 20 nt, Artificial Sequence
  spacer sequence TTCN PAM
ccgugacgcuccucugaccu

SEQ ID NO: 38030 - RNA, 20 nt, Artificial Sequence
  spacer sequence TTCN PAM
auuccuaaggggcacuaccc

SEQ ID NO: 38031 - RNA, 20 nt, Artificial Sequence
  spacer sequence TTCN PAM
uaaggggcacuacccuuggu

SEQ ID NO: 38032 - RNA, 20 nt, Artificial Sequence
  spacer sequence TTCN PAM
agaccaaggguagugccccu

SEQ ID NO: 38033 - RNA, 20 nt, Artificial Sequence
  spacer sequence TTCN PAM
aacccuaccgcccaacucca

SEQ ID NO: 38034 - RNA, 20 nt, Artificial Sequence
  spacer sequence TTCN PAM
agaccugaggggcggccagc

SEQ ID NO: 38035 - RNA, 20 nt, Artificial Sequence
  spacer sequence TTCN PAM
guucuugcugucagcagcga

SEQ ID NO: 38036 - RNA, 20 nt, Artificial Sequence
  spacer sequence TTCN PAM
ugcugucagcagcgagggcu

SEQ ID NO: 38037 - RNA, 20 nt, Artificial Sequence
  spacer sequence TTCN PAM
aaaggcaggccuggggcaca

SEQ ID NO: 38038 - RNA, 20 nt, Artificial Sequence
  spacer sequence TTCN PAM
gccucuagaggcuggaaucg

SEQ ID NO: 38039 - RNA, 20 nt, Artificial Sequence
  spacer sequence TTCN PAM
agccucuagaggcagaaguu

SEQ ID NO: 38040 - RNA, 20 nt, Artificial Sequence
  spacer sequence TTCN PAM
gugggaaaccucauguugug

SEQ ID NO: 38041 - RNA, 20 nt, Artificial Sequence
  spacer sequence TTCN PAM
cacugaacggcacgauucca

SEQ ID NO: 38042 - RNA, 20 nt, Artificial Sequence
  spacer sequence TTCN PAM
uaucaaaaccaagagucucc

SEQ ID NO: 38043 - RNA, 20 nt, Artificial Sequence
  spacer sequence TTCN PAM
auccagguccccuccacagc

SEQ ID NO: 38044 - RNA, 20 nt, Artificial Sequence
  spacer sequence TTCN PAM
agcgauucuccugccucaac

SEQ ID NO: 38045 - RNA, 20 nt, Artificial Sequence
  spacer sequence TTCN PAM
ccugccucaaccuccugagu

SEQ ID NO: 38046 - RNA, 20 nt, Artificial Sequence
  spacer sequence TTCN PAM
aacauuguuggccaggcugg

SEQ ID NO: 38047 - RNA, 20 nt, Artificial Sequence
  spacer sequence TTCN PAM
aaaccccaucuuuaccaaaa

SEQ ID NO: 38048 - RNA, 20 nt, Artificial Sequence
  spacer sequence TTCN PAM
agaccagccuggccaacaau

SEQ ID NO: 38049 - RNA, 20 nt, Artificial Sequence
  spacer sequence TTCN PAM
aaccagaugccaucaaagau

SEQ ID NO: 38050 - RNA, 20 nt, Artificial Sequence
  spacer sequence TTCN PAM
cuugccccaaacaccaccuu

SEQ ID NO: 38051 - RNA, 20 nt, Artificial Sequence
  spacer sequence TTCN PAM
uuuuucucuugccccaaaca

SEQ ID NO: 38052 - RNA, 20 nt, Artificial Sequence
  spacer sequence TTCN PAM
cacaccccagagacguggca

SEQ ID NO: 38053 - RNA, 20 nt, Artificial Sequence
  spacer sequence TTCN PAM
ucacaugcugagcccuggcc

SEQ ID NO: 38054 - RNA, 20 nt, Artificial Sequence
  spacer sequence TTCN PAM
gacccccuuuccucacaugc

SEQ ID NO: 38055 - RNA, 20 nt, Artificial Sequence
  spacer sequence TTCN PAM
ccagguucugacccccuuuc

SEQ ID NO: 38056 - RNA, 20 nt, Artificial Sequence
  spacer sequence TTCN PAM
ucuccagguucugacccccu

SEQ ID NO: 38057 - RNA, 20 nt, Artificial Sequence
  spacer sequence TTCN PAM
ucuucuccagguucugaccc

SEQ ID NO: 38058 - RNA, 20 nt, Artificial Sequence
  spacer sequence TTCN PAM
cgagggagcuguaguccucg

SEQ ID NO: 38059 - RNA, 20 nt, Artificial Sequence
  spacer sequence TTCN PAM
gcuggucauuguggguugag

SEQ ID NO: 38060 - RNA, 20 nt, Artificial Sequence
  spacer sequence TTCN PAM
gggcuugugccccgagagcc

SEQ ID NO: 38061 - RNA, 20 nt, Artificial Sequence
  spacer sequence TTCN PAM
ggucagucagcaguggugcc

SEQ ID NO: 38062 - RNA, 20 nt, Artificial Sequence
  spacer sequence TTCN PAM
guuuuucccaaguggacugc

SEQ ID NO: 38063 - RNA, 20 nt, Artificial Sequence
  spacer sequence TTCN PAM
caaguggacugcugucuuua

SEQ ID NO: 38064 - RNA, 20 nt, Artificial Sequence
  spacer sequence TTCN PAM
uggagauaaaaccuguuugu

SEQ ID NO: 38065 - RNA, 20 nt, Artificial Sequence
  spacer sequence TTCN PAM
gugugggaggagggagaggu

SEQ ID NO: 38066 - RNA, 20 nt, Artificial Sequence
  spacer sequence TTCN PAM
ucugaagcauuugcaacaau

SEQ ID NO: 38067 - RNA, 20 nt, Artificial Sequence
  spacer sequence TTCN PAM
gaugaaaguaccucucccuc

SEQ ID NO: 38068 - RNA, 20 nt, Artificial Sequence
  spacer sequence TTCN PAM
cugcuucugugggccugcuu

SEQ ID NO: 38069 - RNA, 20 nt, Artificial Sequence
  spacer sequence TTCN PAM
gugggccugcuuuccagcug

SEQ ID NO: 38070 - RNA, 20 nt, Artificial Sequence
  spacer sequence TTCN PAM
agcuggaguggcccucagcu

SEQ ID NO: 38071 - RNA, 20 nt, Artificial Sequence
  spacer sequence TTCN PAM
aucgggugguccuugagccc

SEQ ID NO: 38072 - RNA, 20 nt, Artificial Sequence
  spacer sequence TTCN PAM
uagggggcuccugggcuggg

SEQ ID NO: 38073 - RNA, 20 nt, Artificial Sequence
  spacer sequence TTCN PAM
acgucccagcccaggagccc

SEQ ID NO: 38074 - RNA, 20 nt, Artificial Sequence
  spacer sequence TTCN PAM
aguccuggcugggcuucaac

SEQ ID NO: 38075 - RNA, 20 nt, Artificial Sequence
  spacer sequence TTCN PAM
gugugggguuaaagacaccu

SEQ ID NO: 38076 - RNA, 20 nt, Artificial Sequence
  spacer sequence TTCN PAM
uaggugucuuuaaccccaca

SEQ ID NO: 38077 - RNA, 20 nt, Artificial Sequence
  spacer sequence TTCN PAM
agucugcagcuggggcccua

SEQ ID NO: 38078 - RNA, 20 nt, Artificial Sequence
  spacer sequence TTCN PAM
ugucaaucugugugcuucag

SEQ ID NO: 38079 - RNA, 20 nt, Artificial Sequence
  spacer sequence TTCN PAM
ggacaggugcccugaaggga

SEQ ID NO: 38080 - RNA, 20 nt, Artificial Sequence
  spacer sequence TTCN PAM
gggcaccuguccugaagcac

SEQ ID NO: 38081 - RNA, 20 nt, Artificial Sequence
  spacer sequence TTCN PAM
cagcagcugccagguacccc

SEQ ID NO: 38082 - RNA, 20 nt, Artificial Sequence
  spacer sequence TTCN PAM
guucugcuggggcgccguug

SEQ ID NO: 38083 - RNA, 20 nt, Artificial Sequence
  spacer sequence TTCN PAM
gcuggggcgccguugagcug

SEQ ID NO: 38084 - RNA, 20 nt, Artificial Sequence
  spacer sequence TTCN PAM
caugggcaaguggccuggca

SEQ ID NO: 38085 - RNA, 20 nt, Artificial Sequence
  spacer sequence TTCN PAM
ggcaggcggccaagaggacc

SEQ ID NO: 38086 - RNA, 20 nt, Artificial Sequence
  spacer sequence TTCN PAM
ucugagcgguccucuuggcc

SEQ ID NO: 38087 - RNA, 20 nt, Artificial Sequence
  spacer sequence TTCN PAM
ugucugcucuccccuccagc

SEQ ID NO: 38088 - RNA, 20 nt, Artificial Sequence
  spacer sequence TTCN PAM
ugugggaggcgaagguugga

SEQ ID NO: 38089 - RNA, 20 nt, Artificial Sequence
  spacer sequence TTCN PAM
ccucccacaggaagucgcuu

SEQ ID NO: 38090 - RNA, 20 nt, Artificial Sequence
  spacer sequence TTCN PAM
ucccguccucccuuccuccg

SEQ ID NO: 38091 - RNA, 20 nt, Artificial Sequence
  spacer sequence TTCN PAM
uccgguccuggcacugcugu

SEQ ID NO: 38092 - RNA, 20 nt, Artificial Sequence
  spacer sequence TTCN PAM
gaucgcgugguuuccaccug

SEQ ID NO: 38093 - RNA, 20 nt, Artificial Sequence
  spacer sequence TTCN PAM
accugaggcggcuggcucug

SEQ ID NO: 38094 - RNA, 20 nt, Artificial Sequence
  spacer sequence TTCN PAM
ccugggccugcgcagccccg

SEQ ID NO: 38095 - RNA, 20 nt, Artificial Sequence
  spacer sequence TTCN PAM
gagucuggggcccccuauga

SEQ ID NO: 38096 - RNA, 20 nt, Artificial Sequence
  spacer sequence TTCN PAM
guauuuggcuucaucugugu

SEQ ID NO: 38097 - RNA, 20 nt, Artificial Sequence
  spacer sequence TTCN PAM
ucuguguccggccggaaccu

SEQ ID NO: 38098 - RNA, 20 nt, Artificial Sequence
  spacer sequence TTCN PAM
ggccggacacagaugaagcc

SEQ ID NO: 38099 - RNA, 20 nt, Artificial Sequence
  spacer sequence TTCN PAM
uucucugacccuaaagucuu

SEQ ID NO: 38100 - RNA, 20 nt, Artificial Sequence
  spacer sequence TTCN PAM
cugacccuaaagucuugggg

SEQ ID NO: 38101 - RNA, 20 nt, Artificial Sequence
  spacer sequence TTCN PAM
guccccaagacuuuaggguc

SEQ ID NO: 38102 - RNA, 20 nt, Artificial Sequence
  spacer sequence TTCN PAM
ugguuccggcccuuguggcu

SEQ ID NO: 38103 - RNA, 20 nt, Artificial Sequence
  spacer sequence TTCN PAM
ggcccuuguggcugcucgau

SEQ ID NO: 38104 - RNA, 20 nt, Artificial Sequence
  spacer sequence TTCN PAM
ccauccuccuugagcaggug

SEQ ID NO: 38105 - RNA, 20 nt, Artificial Sequence
  spacer sequence TTCN PAM
uuccaggaagcucuugagcc

SEQ ID NO: 38106 - RNA, 20 nt, Artificial Sequence
  spacer sequence TTCN PAM
aggaagcucuugagccaggg

SEQ ID NO: 38107 - RNA, 20 nt, Artificial Sequence
  spacer sequence TTCN PAM
uggaaggaagacugcccgag

SEQ ID NO: 38108 - RNA, 20 nt, Artificial Sequence
  spacer sequence TTCN PAM
gcuccacuccugcccuggcc

SEQ ID NO: 38109 - RNA, 20 nt, Artificial Sequence
  spacer sequence TTCN PAM
cuuaaggccgccuccccucc

SEQ ID NO: 38110 - RNA, 20 nt, Artificial Sequence
  spacer sequence TTCN PAM
uucugaugcgauggcccugg

SEQ ID NO: 38111 - RNA, 20 nt, Artificial Sequence
  spacer sequence TTCN PAM
gaugcgauggcccugggccc

SEQ ID NO: 38112 - RNA, 20 nt, Artificial Sequence
  spacer sequence TTCN PAM
gcaggugggggcaggcucuu

SEQ ID NO: 38113 - RNA, 20 nt, Artificial Sequence
  spacer sequence TTCN PAM
cugggauggcccuguccugg

SEQ ID NO: 38114 - RNA, 20 nt, Artificial Sequence
  spacer sequence TTCN PAM
guguaacuaagggccguaac

SEQ ID NO: 38115 - RNA, 20 nt, Artificial Sequence
  spacer sequence TTCN PAM
cucuuugaauaaacgugugu

SEQ ID NO: 38116 - RNA, 20 nt, Artificial Sequence
  spacer sequence TTCN PAM
aagagugaaauuggaggaga

SEQ ID NO: 38117 - RNA, 20 nt, Artificial Sequence
  spacer sequence TTCN PAM
auccuugcagcgggggggau

SEQ ID NO: 38118 - RNA, 20 nt, Artificial Sequence
  spacer sequence TTCN PAM
uagaaguugauccaauuaca

SEQ ID NO: 38119 - RNA, 20 nt, Artificial Sequence
  spacer sequence TTCN PAM
aagaauugcacuagacugau

SEQ ID NO: 38120 - RNA, 20 nt, Artificial Sequence
  spacer sequence TTCN PAM
auguaauuggaucaacuucu

SEQ ID NO: 38121 - RNA, 20 nt, Artificial Sequence
  spacer sequence TTCN PAM
cugguuauuucuauguaauu

SEQ ID NO: 38122 - RNA, 20 nt, Artificial Sequence
  spacer sequence TTCN PAM
ggagagaaaauggacagguc

SEQ ID NO: 38123 - RNA, 20 nt, Artificial Sequence
  spacer sequence TTCN PAM
cuccagaaacaaucuauuca

SEQ ID NO: 38124 - RNA, 20 nt, Artificial Sequence
  spacer sequence TTCN PAM
gaccuguccauuuucucucc

SEQ ID NO: 38125 - RNA, 20 nt, Artificial Sequence
  spacer sequence TTCN PAM
uuuccgggcuggaaaacagg

SEQ ID NO: 38126 - RNA, 20 nt, Artificial Sequence
  spacer sequence TTCN PAM
gggcuggaaaacaggagagg

SEQ ID NO: 38127 - RNA, 20 nt, Artificial Sequence
  spacer sequence TTCN PAM
agcccggaaaagaaacccga

SEQ ID NO: 38128 - RNA, 20 nt, Artificial Sequence
  spacer sequence TTCN PAM
cuugcgaggccaccagaagu

SEQ ID NO: 38129 - RNA, 20 nt, Artificial Sequence
  spacer sequence TTCN PAM
gguggccucgcaagagaacc

SEQ ID NO: 38130 - RNA, 20 nt, Artificial Sequence
  spacer sequence TTCN PAM
agaauuuggaaaaaggagca

SEQ ID NO: 38131 - RNA, 20 nt, Artificial Sequence
  spacer sequence TTCN PAM
ggaagcccuggguacucagc

SEQ ID NO: 38132 - RNA, 20 nt, Artificial Sequence
  spacer sequence TTCN PAM
aaauucuggaagcccugggu

SEQ ID NO: 38133 - RNA, 20 nt, Artificial Sequence
  spacer sequence TTCN PAM
acggcagggcagccugagcg

SEQ ID NO: 38134 - RNA, 20 nt, Artificial Sequence
  spacer sequence TTCN PAM
ccaccggccggcccugcucc

SEQ ID NO: 38135 - RNA, 20 nt, Artificial Sequence
  spacer sequence TTCN PAM
caccaggccagagccucccu

SEQ ID NO: 38136 - RNA, 20 nt, Artificial Sequence
  spacer sequence TTCN PAM
cuugcagcggggaucugacg

SEQ ID NO: 38137 - RNA, 20 nt, Artificial Sequence
  spacer sequence TTCN PAM
cuacuugugucacuaacgga

SEQ ID NO: 38138 - RNA, 20 nt, Artificial Sequence
  spacer sequence TTCN PAM
gcagguaaggccgggacucg

SEQ ID NO: 38139 - RNA, 20 nt, Artificial Sequence
  spacer sequence TTCN PAM
cuggaacaacguuacguucu

SEQ ID NO: 38140 - RNA, 20 nt, Artificial Sequence
  spacer sequence TTCN PAM
agggaaagacacccacgggu

SEQ ID NO: 38141 - RNA, 20 nt, Artificial Sequence
  spacer sequence TTCN PAM
uguucugggacucuacuuuc

SEQ ID NO: 38142 - RNA, 20 nt, Artificial Sequence
  spacer sequence TTCN PAM
gggacucuacuuuccaucuc

SEQ ID NO: 38143 - RNA, 20 nt, Artificial Sequence
  spacer sequence TTCN PAM
aucuccaacugcaggggccc

SEQ ID NO: 38144 - RNA, 20 nt, Artificial Sequence
  spacer sequence TTCN PAM
cgcugcagagaauuuccagg

SEQ ID NO: 38145 - RNA, 20 nt, Artificial Sequence
  spacer sequence TTCN PAM
cugcagcgagaacuuggacc

SEQ ID NO: 38146 - RNA, 20 nt, Artificial Sequence
  spacer sequence TTCN PAM
agggaggcgcuggauggaug

SEQ ID NO: 38147 - RNA, 20 nt, Artificial Sequence
  spacer sequence TTCN PAM
caugcacccuccuggggcuc

SEQ ID NO: 38148 - RNA, 20 nt, Artificial Sequence
  spacer sequence TTCN PAM
ucugugggcuccugcgaguu

SEQ ID NO: 38149 - RNA, 20 nt, Artificial Sequence
  spacer sequence TTCN PAM
gcaaacggaaaugacagcaa

SEQ ID NO: 38150 - RNA, 20 nt, Artificial Sequence
  spacer sequence TTCN PAM
guuugcugaaaagggggugc

SEQ ID NO: 38151 - RNA, 20 nt, Artificial Sequence
  spacer sequence TTCN PAM
ugcugucauuuccguuugcu

SEQ ID NO: 38152 - RNA, 20 nt, Artificial Sequence
  spacer sequence TTCN PAM
aaggugacagccgaagugca

SEQ ID NO: 38153 - RNA, 20 nt, Artificial Sequence
  spacer sequence TTCN PAM
gcugucaccuuugaacuucu

SEQ ID NO: 38154 - RNA, 20 nt, Artificial Sequence
  spacer sequence TTCN PAM
ggauguggaucacucuagag

SEQ ID NO: 38155 - RNA, 20 nt, Artificial Sequence
  spacer sequence TTCN PAM
cccuccgugacgucgauggg

SEQ ID NO: 38156 - RNA, 20 nt, Artificial Sequence
  spacer sequence TTCN PAM
caaagggcagccccagggag

SEQ ID NO: 38157 - RNA, 20 nt, Artificial Sequence
  spacer sequence TTCN PAM
gcaucaggagguuggugacc

SEQ ID NO: 38158 - RNA, 20 nt, Artificial Sequence
  spacer sequence TTCN PAM
ccuucagcaucaggagguug

SEQ ID NO: 38159 - RNA, 20 nt, Artificial Sequence
  spacer sequence TTCN PAM
ccggggugcucacaccgugc

SEQ ID NO: 38160 - RNA, 20 nt, Artificial Sequence
  spacer sequence TTCN PAM
ucgagaugaacacggaggag

SEQ ID NO: 38161 - RNA, 20 nt, Artificial Sequence
  spacer sequence TTCN PAM
ucucgaugaaggccuguugg

SEQ ID NO: 38162 - RNA, 20 nt, Artificial Sequence
  spacer sequence TTCN PAM
ccaugguguuggcagccucc

SEQ ID NO: 38163 - RNA, 20 nt, Artificial Sequence
  spacer sequence TTCN PAM
ccaaccacaaggagcugaag

SEQ ID NO: 38164 - RNA, 20 nt, Artificial Sequence
  spacer sequence TTCN PAM
gcuccuugugguuggagaac

SEQ ID NO: 38165 - RNA, 20 nt, Artificial Sequence
  spacer sequence TTCN PAM
ccgccugcagggccgccugg

SEQ ID NO: 38166 - RNA, 20 nt, Artificial Sequence
  spacer sequence TTCN PAM
ccgacuggaccgaguucacc

SEQ ID NO: 38167 - RNA, 20 nt, Artificial Sequence
  spacer sequence TTCN PAM
ccacgaugauccugagcacg

SEQ ID NO: 38168 - RNA, 20 nt, Artificial Sequence
  spacer sequence TTCN PAM
acccugugacccuggaugug

SEQ ID NO: 38169 - RNA, 20 nt, Artificial Sequence
  spacer sequence TTCN PAM
ccaaguucggcacaguguug

SEQ ID NO: 38170 - RNA, 20 nt, Artificial Sequence
  spacer sequence TTCN PAM
gcacaguguugaagaucauc

SEQ ID NO: 38171 - RNA, 20 nt, Artificial Sequence
  spacer sequence TTCN PAM
acacugugccgaacuuggag

SEQ ID NO: 38172 - RNA, 20 nt, Artificial Sequence
  spacer sequence TTCN PAM
ccaagaacaaccaguuccag

SEQ ID NO: 38173 - RNA, 20 nt, Artificial Sequence
  spacer sequence TTCN PAM
uggugaaggugaugaucuuc

SEQ ID NO: 38174 - RNA, 20 nt, Artificial Sequence
  spacer sequence TTCN PAM
aggcccugcugcaguaugcg

SEQ ID NO: 38175 - RNA, 20 nt, Artificial Sequence
  spacer sequence TTCN PAM
gcccguccagcgacugaggg

SEQ ID NO: 38176 - RNA, 20 nt, Artificial Sequence
  spacer sequence TTCN PAM
aagcucaccagccucaacgu

SEQ ID NO: 38177 - RNA, 20 nt, Artificial Sequence
  spacer sequence TTCN PAM
ggggacagccagcccucgcu

SEQ ID NO: 38178 - RNA, 20 nt, Artificial Sequence
  spacer sequence TTCN PAM
guaagaggcugcccgacgcg

SEQ ID NO: 38179 - RNA, 20 nt, Artificial Sequence
  spacer sequence TTCN PAM
cgggcagauccgcugcucca

SEQ ID NO: 38180 - RNA, 20 nt, Artificial Sequence
  spacer sequence TTCN PAM
aggugcaccugguauaaucu

SEQ ID NO: 38181 - RNA, 20 nt, Artificial Sequence
  spacer sequence TTCN PAM
cucccaccuuugccauuccu

SEQ ID NO: 38182 - RNA, 20 nt, Artificial Sequence
  spacer sequence TTCN PAM
ucaagcugcagguauucaaa

SEQ ID NO: 38183 - RNA, 20 nt, Artificial Sequence
  spacer sequence TTCN PAM
aacgcuuggucuugguuccc

SEQ ID NO: 38184 - RNA, 20 nt, Artificial Sequence
  spacer sequence TTCN PAM
ccagcgacugcaugcccaca

SEQ ID NO: 38185 - RNA, 20 nt, Artificial Sequence
  spacer sequence TTCN PAM
caggcagcuccgcauccacg

SEQ ID NO: 38186 - RNA, 20 nt, Artificial Sequence
  spacer sequence TTCN PAM
cgggagaggggacgccacgu

SEQ ID NO: 38187 - RNA, 20 nt, Artificial Sequence
  spacer sequence TTCN PAM
ggcuggcgccguccacacgu

SEQ ID NO: 38188 - RNA, 20 nt, Artificial Sequence
  spacer sequence TTCN PAM
cuucaagcaccuccgggcga

SEQ ID NO: 38189 - RNA, 20 nt, Artificial Sequence
  spacer sequence TTCN PAM
agcaccuccgggcgagcgcg

SEQ ID NO: 38190 - RNA, 20 nt, Artificial Sequence
  spacer sequence TTCN PAM
acuacuagagacaucccucc

SEQ ID NO: 38191 - RNA, 20 nt, Artificial Sequence
  spacer sequence TTCN PAM
cuucugggaccggggcccgg

SEQ ID NO: 38192 - RNA, 20 nt, Artificial Sequence
  spacer sequence TTCN PAM
gggaccggggcccggccgcc

SEQ ID NO: 38193 - RNA, 20 nt, Artificial Sequence
  spacer sequence TTCN PAM
gugcugugggcggggcgcau

SEQ ID NO: 38194 - RNA, 20 nt, Artificial Sequence
  spacer sequence TTCN PAM
aggccuuuccguuccgaacg

SEQ ID NO: 38195 - RNA, 20 nt, Artificial Sequence
  spacer sequence TTCN PAM
guuccgaacguccacggcgc

SEQ ID NO: 38196 - RNA, 20 nt, Artificial Sequence
  spacer sequence TTCN PAM
gaacguccacggcgcccugg

SEQ ID NO: 38197 - RNA, 20 nt, Artificial Sequence
  spacer sequence TTCN PAM
gaacggaaaggccuggaaaa

SEQ ID NO: 38198 - RNA, 20 nt, Artificial Sequence
  spacer sequence TTCN PAM
ugcccccgccaggcccggga

SEQ ID NO: 38199 - RNA, 20 nt, Artificial Sequence
  spacer sequence TTCN PAM
guauugcuggucagcaaccu

SEQ ID NO: 38200 - RNA, 20 nt, Artificial Sequence
  spacer sequence TTCN PAM
uccgcgccgccguuccuccc

SEQ ID NO: 38201 - RNA, 20 nt, Artificial Sequence
  spacer sequence TTCN PAM
ucccggaagagcgagcaggg

SEQ ID NO: 38202 - RNA, 20 nt, Artificial Sequence
  spacer sequence TTCN PAM
gggaggaacggcggcgcgga

SEQ ID NO: 38203 - RNA, 20 nt, Artificial Sequence
  spacer sequence TTCN PAM
aagauggcuugaguuuuccu

SEQ ID NO: 38204 - RNA, 20 nt, Artificial Sequence
  spacer sequence TTCN PAM
ucuuuuccugaauucacauc

SEQ ID NO: 38205 - RNA, 20 nt, Artificial Sequence
  spacer sequence TTCN PAM
ugaauucacaucuugguucg

SEQ ID NO: 38206 - RNA, 20 nt, Artificial Sequence
  spacer sequence TTCN PAM
ggaaaagaggaaaacucaag

SEQ ID NO: 38207 - RNA, 20 nt, Artificial Sequence
  spacer sequence TTCN PAM
caucuugguucgcguuuucu

SEQ ID NO: 38208 - RNA, 20 nt, Artificial Sequence
  spacer sequence TTCN PAM
cguuuucucuugcaugauac

SEQ ID NO: 38209 - RNA, 20 nt, Artificial Sequence
  spacer sequence TTCN PAM
cuugcaugauacgcagaaug

SEQ ID NO: 38210 - RNA, 20 nt, Artificial Sequence
  spacer sequence TTCN PAM
gcguaucaugcaagagaaaa

SEQ ID NO: 38211 - RNA, 20 nt, Artificial Sequence
  spacer sequence TTCN PAM
uucugcguaucaugcaagag

SEQ ID NO: 38212 - RNA, 20 nt, Artificial Sequence
  spacer sequence TTCN PAM
gagccccagcaggccgcccu

SEQ ID NO: 38213 - RNA, 20 nt, Artificial Sequence
  spacer sequence TTCN PAM
cagaaugguuaaauuccccu

SEQ ID NO: 38214 - RNA, 20 nt, Artificial Sequence
  spacer sequence TTCN PAM
gggaaauaacggauccacca

SEQ ID NO: 38215 - RNA, 20 nt, Artificial Sequence
  spacer sequence TTCN PAM
ccucggggagagcuugggug

SEQ ID NO: 38216 - RNA, 20 nt, Artificial Sequence
  spacer sequence TTCN PAM
cccaagcucuccccgagggg

SEQ ID NO: 38217 - RNA, 20 nt, Artificial Sequence
  spacer sequence TTCN PAM
aggaggaucccauccaucaa

SEQ ID NO: 38218 - RNA, 20 nt, Artificial Sequence
  spacer sequence TTCN PAM
ggcuguucuguuucccggca

SEQ ID NO: 38219 - RNA, 20 nt, Artificial Sequence
  spacer sequence TTCN PAM
guuucccggcaacuccugug

SEQ ID NO: 38220 - RNA, 20 nt, Artificial Sequence
  spacer sequence TTCN PAM
cggcaacuccugugacuucc

SEQ ID NO: 38221 - RNA, 20 nt, Artificial Sequence
  spacer sequence TTCN PAM
ucaaggcggugcccagccug

SEQ ID NO: 38222 - RNA, 20 nt, Artificial Sequence
  spacer sequence TTCN PAM
cgccuguaaucguccuuaga

SEQ ID NO: 38223 - RNA, 20 nt, Artificial Sequence
  spacer sequence TTCN PAM
gggagccccuccagcagcgc

SEQ ID NO: 38224 - RNA, 20 nt, Artificial Sequence
  spacer sequence TTCN PAM
cucacaugccggcagagaca

SEQ ID NO: 38225 - RNA, 20 nt, Artificial Sequence
  spacer sequence TTCN PAM
cuuaccgugugcccgucgag

SEQ ID NO: 38226 - RNA, 20 nt, Artificial Sequence
  spacer sequence TTCN PAM
aguuacagguuuaccucgac

SEQ ID NO: 38227 - RNA, 20 nt, Artificial Sequence
  spacer sequence TTCN PAM
aucagucacacuccacacac

SEQ ID NO: 38228 - RNA, 20 nt, Artificial Sequence
  spacer sequence TTCN PAM
uauguauuuacugaccugug

SEQ ID NO: 38229 - RNA, 20 nt, Artificial Sequence
  spacer sequence TTCN PAM
uuucuccccuuccccuuucc

SEQ ID NO: 38230 - RNA, 20 nt, Artificial Sequence
  spacer sequence TTCN PAM
ccccuuccccuuucccuauu

SEQ ID NO: 38231 - RNA, 20 nt, Artificial Sequence
  spacer sequence TTCN PAM
ccuuucccuauuuuuuuucu

SEQ ID NO: 38232 - RNA, 20 nt, Artificial Sequence
  spacer sequence TTCN PAM
cuauuuuuuuucuugcccug

SEQ ID NO: 38233 - RNA, 20 nt, Artificial Sequence
  spacer sequence TTCN PAM
ugcccugauccggaauuucu

SEQ ID NO: 38234 - RNA, 20 nt, Artificial Sequence
  spacer sequence TTCN PAM
ggaucagggcaagaaaaaaa

SEQ ID NO: 38235 - RNA, 20 nt, Artificial Sequence
  spacer sequence TTCN PAM
uugccaacugacugcacggu

SEQ ID NO: 38236 - RNA, 20 nt, Artificial Sequence
  spacer sequence TTCN PAM
gcuuccuguuguugcuugaa

SEQ ID NO: 38237 - RNA, 20 nt, Artificial Sequence
  spacer sequence TTCN PAM
uguuguugcuugaaacaaaa

SEQ ID NO: 38238 - RNA, 20 nt, Artificial Sequence
  spacer sequence TTCN PAM
agcaacaacaggaagcagaa

SEQ ID NO: 38239 - RNA, 20 nt, Artificial Sequence
  spacer sequence TTCN PAM
cccucaaacccugcucuccg

SEQ ID NO: 38240 - RNA, 20 nt, Artificial Sequence
  spacer sequence TTCN PAM
ggagagcaggguuugagggg

SEQ ID NO: 38241 - RNA, 20 nt, Artificial Sequence
  spacer sequence TTCN PAM
agggcagguugguuuccgga

SEQ ID NO: 38242 - RNA, 20 nt, Artificial Sequence
  spacer sequence TTCN PAM
ucauccaucaaccacugcac

SEQ ID NO: 38243 - RNA, 20 nt, Artificial Sequence
  spacer sequence TTCN PAM
ucguguggacgauuggcaac

SEQ ID NO: 38244 - RNA, 20 nt, Artificial Sequence
  spacer sequence TTCN PAM
uuucgguauguuaucguuca

SEQ ID NO: 38245 - RNA, 20 nt, Artificial Sequence
  spacer sequence TTCN PAM
guauguuaucguucacacuu

SEQ ID NO: 38246 - RNA, 20 nt, Artificial Sequence
  spacer sequence TTCN PAM
cacuuuuauuaccuuguuuu

SEQ ID NO: 38247 - RNA, 20 nt, Artificial Sequence
  spacer sequence TTCN PAM
uuaauugagaugauuuugau

SEQ ID NO: 38248 - RNA, 20 nt, Artificial Sequence
  spacer sequence TTCN PAM
guuugcgaauuuuauuuggu

SEQ ID NO: 38249 - RNA, 20 nt, Artificial Sequence
  spacer sequence TTCN PAM
caaaccgaaagcaaaccaua

SEQ ID NO: 38250 - RNA, 20 nt, Artificial Sequence
  spacer sequence TTCN PAM
gaguuagaccugucgguggc

SEQ ID NO: 38251 - RNA, 20 nt, Artificial Sequence
  spacer sequence TTCN PAM
gcaaagucauagcauccagg

SEQ ID NO: 38252 - RNA, 20 nt, Artificial Sequence
  spacer sequence TTCN PAM
aaagcccagggauggggccu

SEQ ID NO: 38253 - RNA, 20 nt, Artificial Sequence
  spacer sequence TTCN PAM
cgcgcugcacgucaccguag

SEQ ID NO: 38254 - RNA, 20 nt, Artificial Sequence
  spacer sequence TTCN PAM
auaagaaggagaacgcccua

SEQ ID NO: 38255 - RNA, 20 nt, Artificial Sequence
  spacer sequence TTCN PAM
uauugaacaggaucuucacg

SEQ ID NO: 38256 - RNA, 20 nt, Artificial Sequence
  spacer sequence TTCN PAM
ccuucuuauugaacaggauc

SEQ ID NO: 38257 - RNA, 20 nt, Artificial Sequence
  spacer sequence TTCN PAM
cucucgggcgccuggucacg

SEQ ID NO: 38258 - RNA, 20 nt, Artificial Sequence
  spacer sequence TTCN PAM
gguggcucauggcuggggga

SEQ ID NO: 38259 - RNA, 20 nt, Artificial Sequence
  spacer sequence TTCN PAM
cgugcagcuugugcccguuc

SEQ ID NO: 38260 - RNA, 20 nt, Artificial Sequence
  spacer sequence TTCN PAM
agagcgugaugcggaugggc

SEQ ID NO: 38261 - RNA, 20 nt, Artificial Sequence
  spacer sequence TTCN PAM
ggugcuucgagagcgugaug

SEQ ID NO: 38262 - RNA, 20 nt, Artificial Sequence
  spacer sequence TTCN PAM
agaagccgggcuccaagaac

SEQ ID NO: 38263 - RNA, 20 nt, Artificial Sequence
  spacer sequence TTCN PAM
ugaagcggugcaggggugag

SEQ ID NO: 38264 - RNA, 20 nt, Artificial Sequence
  spacer sequence TTCN PAM
uggagcccggcuucuugaag

SEQ ID NO: 38265 - RNA, 20 nt, Artificial Sequence
  spacer sequence TTCN PAM
agaacauauucccgcccucg

SEQ ID NO: 38266 - RNA, 20 nt, Artificial Sequence
  spacer sequence TTCN PAM
ggaaguucuuggagcccggc

SEQ ID NO: 38267 - RNA, 20 nt, Artificial Sequence
  spacer sequence TTCN PAM
cgcccucggccacgcugcac

SEQ ID NO: 38268 - RNA, 20 nt, Artificial Sequence
  spacer sequence TTCN PAM
ggcguuuccagagugcaggu

SEQ ID NO: 38269 - RNA, 20 nt, Artificial Sequence
  spacer sequence TTCN PAM
agagugcaggucgggcaccu

SEQ ID NO: 38270 - RNA, 20 nt, Artificial Sequence
  spacer sequence TTCN PAM
gguuugggguaagaggugcc

SEQ ID NO: 38271 - RNA, 20 nt, Artificial Sequence
  spacer sequence TTCN PAM
cacagggagcauccccugag

SEQ ID NO: 38272 - RNA, 20 nt, Artificial Sequence
  spacer sequence TTCN PAM
ccucaaaaaauauaaauaaa

SEQ ID NO: 38273 - RNA, 20 nt, Artificial Sequence
  spacer sequence TTCN PAM
acuguacuccagccugggug

SEQ ID NO: 38274 - RNA, 20 nt, Artificial Sequence
  spacer sequence TTCN PAM
cugcaaccuccgccucuugg

SEQ ID NO: 38275 - RNA, 20 nt, Artificial Sequence
  spacer sequence TTCN PAM
agugauugugccaccucagc

SEQ ID NO: 38276 - RNA, 20 nt, Artificial Sequence
  spacer sequence TTCN PAM
cgaguagcugggacuguagg

SEQ ID NO: 38277 - RNA, 20 nt, Artificial Sequence
  spacer sequence TTCN PAM
ccauauuggccaggcugauc

SEQ ID NO: 38278 - RNA, 20 nt, Artificial Sequence
  spacer sequence TTCN PAM
gccucccaaagugcugggau

SEQ ID NO: 38279 - RNA, 20 nt, Artificial Sequence
  spacer sequence TTCN PAM
gccuccuggguucaugccac

SEQ ID NO: 38280 - RNA, 20 nt, Artificial Sequence
  spacer sequence TTCN PAM
ugccacucugcugccucagc

SEQ ID NO: 38281 - RNA, 20 nt, Artificial Sequence
  spacer sequence TTCN PAM
acuaaaaauacaaaaaauua

SEQ ID NO: 38282 - RNA, 20 nt, Artificial Sequence
  spacer sequence TTCN PAM
cuguguuagccaggauggug

SEQ ID NO: 38283 - RNA, 20 nt, Artificial Sequence
  spacer sequence TTCN PAM
agcaauccccugcccggccc

SEQ ID NO: 38284 - RNA, 20 nt, Artificial Sequence
  spacer sequence TTCN PAM
uguagagacagaggucucac

SEQ ID NO: 38285 - RNA, 20 nt, Artificial Sequence
  spacer sequence TTCN PAM
ggauugggagguugaggugg

SEQ ID NO: 38286 - RNA, 20 nt, Artificial Sequence
  spacer sequence TTCN PAM
cuucgcgcucaggagguuga

SEQ ID NO: 38287 - RNA, 20 nt, Artificial Sequence
  spacer sequence TTCN PAM
cgcucaggagguugagguug

SEQ ID NO: 38288 - RNA, 20 nt, Artificial Sequence
  spacer sequence TTCN PAM
aaauacuugcauuauguaau

SEQ ID NO: 38289 - RNA, 20 nt, Artificial Sequence
  spacer sequence TTCN PAM
caaguaacguguuaaauauc

SEQ ID NO: 38290 - RNA, 20 nt, Artificial Sequence
  spacer sequence TTCN PAM
gauaacauuucacaaguaac

SEQ ID NO: 38291 - RNA, 20 nt, Artificial Sequence
  spacer sequence TTCN PAM
agaccaaccuggccaaccug

SEQ ID NO: 38292 - RNA, 20 nt, Artificial Sequence
  spacer sequence TTCN PAM
ccagguuggccagguugguc

SEQ ID NO: 38293 - RNA, 20 nt, Artificial Sequence
  spacer sequence TTCN PAM
ccugccucagucucccaagu

SEQ ID NO: 38294 - RNA, 20 nt, Artificial Sequence
  spacer sequence TTCN PAM
agugauucuccugccucagu

SEQ ID NO: 38295 - RNA, 20 nt, Artificial Sequence
  spacer sequence TTCN PAM
aucuggaaaaaaaaaagugg

SEQ ID NO: 38296 - RNA, 20 nt, Artificial Sequence
  spacer sequence TTCN PAM
agauggaaucuugcucuguc

SEQ ID NO: 38297 - RNA, 20 nt, Artificial Sequence
  spacer sequence TTCN PAM
gcaaacuuguagaugccugg

SEQ ID NO: 38298 - RNA, 20 nt, Artificial Sequence
  spacer sequence TTCN PAM
uuagaagcugcuucagacca

SEQ ID NO: 38299 - RNA, 20 nt, Artificial Sequence
  spacer sequence TTCN PAM
aacgaaaccaggcaucuaca

SEQ ID NO: 38300 - RNA, 20 nt, Artificial Sequence
  spacer sequence TTCN PAM
gaccauuguggacaugauuu

SEQ ID NO: 38301 - RNA, 20 nt, Artificial Sequence
  spacer sequence TTCN PAM
gggcuccuaaaaggcccuac

SEQ ID NO: 38302 - RNA, 20 nt, Artificial Sequence
  spacer sequence TTCN PAM
ccggcuacucugaaaacuag

SEQ ID NO: 38303 - RNA, 20 nt, Artificial Sequence
  spacer sequence TTCN PAM
gaguagccggggaaggcgua

SEQ ID NO: 38304 - RNA, 20 nt, Artificial Sequence
  spacer sequence TTCN PAM
ccagacuaguuuucagagua

SEQ ID NO: 38305 - RNA, 20 nt, Artificial Sequence
  spacer sequence TTCN PAM
ccucccacaggcccucaguc

SEQ ID NO: 38306 - RNA, 20 nt, Artificial Sequence
  spacer sequence TTCN PAM
agcaaugggggcgucgucaa

SEQ ID NO: 38307 - RNA, 20 nt, Artificial Sequence
  spacer sequence TTCN PAM
aguucuuccagugaguauga

SEQ ID NO: 38308 - RNA, 20 nt, Artificial Sequence
  spacer sequence TTCN PAM
uccagugaguaugaggcggg

SEQ ID NO: 38309 - RNA, 20 nt, Artificial Sequence
  spacer sequence TTCN PAM
agugaguaugaggcgggcug

SEQ ID NO: 38310 - RNA, 20 nt, Artificial Sequence
  spacer sequence TTCN PAM
ugcaagacagggggucaggg

SEQ ID NO: 38311 - RNA, 20 nt, Artificial Sequence
  spacer sequence TTCN PAM
ccccgaggucgugguugugc

SEQ ID NO: 38312 - RNA, 20 nt, Artificial Sequence
  spacer sequence TTCN PAM
ccaaguccaccaucuagggg

SEQ ID NO: 38313 - RNA, 20 nt, Artificial Sequence
  spacer sequence TTCN PAM
aucauuccagagaaaagcca

SEQ ID NO: 38314 - RNA, 20 nt, Artificial Sequence
  spacer sequence TTCN PAM
agagaaaagccacuuuaaaa

SEQ ID NO: 38315 - RNA, 20 nt, Artificial Sequence
  spacer sequence TTCN PAM
cuggaaugauggaaguuguc

SEQ ID NO: 38316 - RNA, 20 nt, Artificial Sequence
  spacer sequence TTCN PAM
gcuguuuuuaaaguggcuuu

SEQ ID NO: 38317 - RNA, 20 nt, Artificial Sequence
  spacer sequence TTCN PAM
cuuuaaaaaaauaaaaucuc

SEQ ID NO: 38318 - RNA, 20 nt, Artificial Sequence
  spacer sequence TTCN PAM
ccuugcucacccugcgguga

SEQ ID NO: 38319 - RNA, 20 nt, Artificial Sequence
  spacer sequence TTCN PAM
cggcccuccacacccggggc

SEQ ID NO: 38320 - RNA, 20 nt, Artificial Sequence
  spacer sequence TTCN PAM
uugugccuuaaaaaaccugc

SEQ ID NO: 38321 - RNA, 20 nt, Artificial Sequence
  spacer sequence TTCN PAM
ugcagccacacacccacccg

SEQ ID NO: 38322 - RNA, 20 nt, Artificial Sequence
  spacer sequence TTCN PAM
cccuucaccccgcccccagg

SEQ ID NO: 38323 - RNA, 20 nt, Artificial Sequence
  spacer sequence TTCN PAM
ccccgcccccagggccuucc

SEQ ID NO: 38324 - RNA, 20 nt, Artificial Sequence
  spacer sequence TTCN PAM
cuucugcccccaggcgggcu

SEQ ID NO: 38325 - RNA, 20 nt, Artificial Sequence
  spacer sequence TTCN PAM
gcccccaggcgggcuccccg

SEQ ID NO: 38326 - RNA, 20 nt, Artificial Sequence
  spacer sequence TTCN PAM
aguugaccaaauauucuaau

SEQ ID NO: 38327 - RNA, 20 nt, Artificial Sequence
  spacer sequence TTCN PAM
aaucuuuuuucauuuauaug

SEQ ID NO: 38328 - RNA, 20 nt, Artificial Sequence
  spacer sequence TTCN PAM
uuuauaugcaaaagaaauag

SEQ ID NO: 38329 - RNA, 20 nt, Artificial Sequence
  spacer sequence TTCN PAM
uuugcauauaaaugaaaaaa

SEQ ID NO: 38330 - RNA, 20 nt, Artificial Sequence
  spacer sequence TTCN PAM
uugugguauuaccuuguaug

SEQ ID NO: 38331 - RNA, 20 nt, Artificial Sequence
  spacer sequence TTCN PAM
uuguaauuaagucacaggca

SEQ ID NO: 38332 - RNA, 20 nt, Artificial Sequence
  spacer sequence TTCN PAM
agagagcaggcggggccgcc

SEQ ID NO: 38333 - RNA, 20 nt, Artificial Sequence
  spacer sequence TTCN PAM
gggaaggggcgggcgugucg

SEQ ID NO: 38334 - RNA, 20 nt, Artificial Sequence
  spacer sequence TTCN PAM
cugaagcucaggggcucuaa

SEQ ID NO: 38335 - RNA, 20 nt, Artificial Sequence
  spacer sequence TTCN PAM
ccugcagucgccuagaaaac

SEQ ID NO: 38336 - RNA, 20 nt, Artificial Sequence
  spacer sequence TTCN PAM
aggcgacugcaggugaaggc

SEQ ID NO: 38337 - RNA, 20 nt, Artificial Sequence
  spacer sequence TTCN PAM
ggguuuuuucuuccuucaaa

SEQ ID NO: 38338 - RNA, 20 nt, Artificial Sequence
  spacer sequence TTCN PAM
uccuucaaauuuuggaccaa

SEQ ID NO: 38339 - RNA, 20 nt, Artificial Sequence
  spacer sequence TTCN PAM
uucaaauuuuggaccaaagu

SEQ ID NO: 38340 - RNA, 20 nt, Artificial Sequence
  spacer sequence TTCN PAM
aauuuuggaccaaagucuca

SEQ ID NO: 38341 - RNA, 20 nt, Artificial Sequence
  spacer sequence TTCN PAM
guguuuugccugccucugau

SEQ ID NO: 38342 - RNA, 20 nt, Artificial Sequence
  spacer sequence TTCN PAM
gggucccagcaucagaggca

SEQ ID NO: 38343 - RNA, 20 nt, Artificial Sequence
  spacer sequence TTCN PAM
cugugcucuuucuaccgccc

SEQ ID NO: 38344 - RNA, 20 nt, Artificial Sequence
  spacer sequence TTCN PAM
accgcccccgcguccugucc

SEQ ID NO: 38345 - RNA, 20 nt, Artificial Sequence
  spacer sequence TTCN PAM
guaaaagcguguaacaaggg

SEQ ID NO: 38346 - RNA, 20 nt, Artificial Sequence
  spacer sequence TTCN PAM
aggcucaguauugugaccgc

SEQ ID NO: 38347 - RNA, 20 nt, Artificial Sequence
  spacer sequence TTCN PAM
guugccuuacccgauggcuu

SEQ ID NO: 38348 - RNA, 20 nt, Artificial Sequence
  spacer sequence TTCN PAM
cuccgcgucacaagccaucg

SEQ ID NO: 38349 - RNA, 20 nt, Artificial Sequence
  spacer sequence TTCN PAM
caaacgguuuuaaucgguuc

SEQ ID NO: 38350 - RNA, 20 nt, Artificial Sequence
  spacer sequence TTCN PAM
cuguggacgcuguagaggca

SEQ ID NO: 38351 - RNA, 20 nt, Artificial Sequence
  spacer sequence TTCN PAM
aauaaaucuucuguauccuc

SEQ ID NO: 38352 - RNA, 20 nt, Artificial Sequence
  spacer sequence TTCN PAM
aaguccagguacagacuggc

SEQ ID NO: 38353 - RNA, 20 nt, Artificial Sequence
  spacer sequence TTCN PAM
guauccucgcuccguuccgc

SEQ ID NO: 38354 - RNA, 20 nt, Artificial Sequence
  spacer sequence TTCN PAM
gccuucguugcuggcuuccu

SEQ ID NO: 38355 - RNA, 20 nt, Artificial Sequence
  spacer sequence TTCN PAM
uugcuggcuuccucuuucug

SEQ ID NO: 38356 - RNA, 20 nt, Artificial Sequence
  spacer sequence TTCN PAM
ucuuucugugccgcgggcgg

SEQ ID NO: 38357 - RNA, 20 nt, Artificial Sequence
  spacer sequence TTCN PAM
gugccgcgggcggccccgac

SEQ ID NO: 38358 - RNA, 20 nt, Artificial Sequence
  spacer sequence TTCN PAM
ccgacuagcgcggcggggcc

SEQ ID NO: 38359 - RNA, 20 nt, Artificial Sequence
  spacer sequence TTCN PAM
gcaagaugcaggcgcgccgc

SEQ ID NO: 38360 - RNA, 20 nt, Artificial Sequence
  spacer sequence TTCN PAM
gggccguggccaccgucaac

SEQ ID NO: 38361 - RNA, 20 nt, Artificial Sequence
  spacer sequence TTCN PAM
gcggcggggccaagcccccg

SEQ ID NO: 38362 - RNA, 20 nt, Artificial Sequence
  spacer sequence TTCN PAM
acucccagggcgcgccgccg

SEQ ID NO: 38363 - RNA, 20 nt, Artificial Sequence
  spacer sequence TTCN PAM
cggccaucaugagccacuug

SEQ ID NO: 38364 - RNA, 20 nt, Artificial Sequence
  spacer sequence TTCN PAM
uccuccuccucuuccucuuc

SEQ ID NO: 38365 - RNA, 20 nt, Artificial Sequence
  spacer sequence TTCN PAM
ucuucguccuccuccucuuc

SEQ ID NO: 38366 - RNA, 20 nt, Artificial Sequence
  spacer sequence TTCN PAM
uccuccuccucuuccuccuc

SEQ ID NO: 38367 - RNA, 20 nt, Artificial Sequence
  spacer sequence TTCN PAM
uccuccuccgccauggguuc

SEQ ID NO: 38368 - RNA, 20 nt, Artificial Sequence
  spacer sequence TTCN PAM
gcgggcgcgcgcaggugccc

SEQ ID NO: 38369 - RNA, 20 nt, Artificial Sequence
  spacer sequence TTCN PAM
gcuuccacucgcugaugagc

SEQ ID NO: 38370 - RNA, 20 nt, Artificial Sequence
  spacer sequence TTCN PAM
acucgcugaugagcugcuug

SEQ ID NO: 38371 - RNA, 20 nt, Artificial Sequence
  spacer sequence TTCN PAM
gccacacgcugcccagggcc

SEQ ID NO: 38372 - RNA, 20 nt, Artificial Sequence
  spacer sequence TTCN PAM
ccuuggccauggggcugcgc

SEQ ID NO: 38373 - RNA, 20 nt, Artificial Sequence
  spacer sequence TTCN PAM
ggcugcccagcgaggucuuc

SEQ ID NO: 38374 - RNA, 20 nt, Artificial Sequence
  spacer sequence TTCN PAM
cgcgggccacgggccggggc

SEQ ID NO: 38375 - RNA, 20 nt, Artificial Sequence
  spacer sequence TTCN PAM
gcugauaaaccgagucgugg

SEQ ID NO: 38376 - RNA, 20 nt, Artificial Sequence
  spacer sequence TTCN PAM
cugcagguggggccuggaag

SEQ ID NO: 38377 - RNA, 20 nt, Artificial Sequence
  spacer sequence TTCN PAM
aggccccaccugcagagaag

SEQ ID NO: 38378 - RNA, 20 nt, Artificial Sequence
  spacer sequence TTCN PAM
caggggaucugaggggggag

SEQ ID NO: 38379 - RNA, 20 nt, Artificial Sequence
  spacer sequence TTCN PAM
gaugggggucggcauggguu

SEQ ID NO: 38380 - RNA, 20 nt, Artificial Sequence
  spacer sequence TTCN PAM
ucaucggggcgggcaucgcu

SEQ ID NO: 38381 - RNA, 20 nt, Artificial Sequence
  spacer sequence TTCN PAM
ccuuugccaucgccgcgggc

SEQ ID NO: 38382 - RNA, 20 nt, Artificial Sequence
  spacer sequence TTCN PAM
gcagcuuggugguguccgag

SEQ ID NO: 38383 - RNA, 20 nt, Artificial Sequence
  spacer sequence TTCN PAM
acucggucaucucggacacc

SEQ ID NO: 38384 - RNA, 20 nt, Artificial Sequence
  spacer sequence TTCN PAM
caggcccucuugcugacccg

SEQ ID NO: 38385 - RNA, 20 nt, Artificial Sequence
  spacer sequence TTCN PAM
ccgcggucuaugugucggug

SEQ ID NO: 38386 - RNA, 20 nt, Artificial Sequence
  spacer sequence TTCN PAM
cgucccagcacgccacgcug

SEQ ID NO: 38387 - RNA, 20 nt, Artificial Sequence
  spacer sequence TTCN PAM
uguaagaggcguccagcgug

SEQ ID NO: 38388 - RNA, 20 nt, Artificial Sequence
  spacer sequence TTCN PAM
ucaccgucugcaagcccaac

SEQ ID NO: 38389 - RNA, 20 nt, Artificial Sequence
  spacer sequence TTCN PAM
uccucaccgucugcaagccc

SEQ ID NO: 38390 - RNA, 20 nt, Artificial Sequence
  spacer sequence TTCN PAM
gccugugugccacagcccug

SEQ ID NO: 38391 - RNA, 20 nt, Artificial Sequence
  spacer sequence TTCN PAM
gcccugcagguguccacgug

SEQ ID NO: 38392 - RNA, 20 nt, Artificial Sequence
  spacer sequence TTCN PAM
ugcggcguacggugcgguuu

SEQ ID NO: 38393 - RNA, 20 nt, Artificial Sequence
  spacer sequence TTCN PAM
acuccuuccugcggcguacg

SEQ ID NO: 38394 - RNA, 20 nt, Artificial Sequence
  spacer sequence TTCN PAM
ccgagguggcgggggugggc

SEQ ID NO: 38395 - RNA, 20 nt, Artificial Sequence
  spacer sequence TTCN PAM
cggccccugccgccucggug

SEQ ID NO: 38396 - RNA, 20 nt, Artificial Sequence
  spacer sequence TTCN PAM
agugcuaugaccgcacucuc

SEQ ID NO: 38397 - RNA, 20 nt, Artificial Sequence
  spacer sequence TTCN PAM
agccggccaaggugggcuuc

SEQ ID NO: 38398 - RNA, 20 nt, Artificial Sequence
  spacer sequence TTCN PAM
uggagcugaccgaccucuuc

SEQ ID NO: 38399 - RNA, 20 nt, Artificial Sequence
  spacer sequence TTCN PAM
aucguauccuuguacuuccu

SEQ ID NO: 38400 - RNA, 20 nt, Artificial Sequence
  spacer sequence TTCN PAM
uccaucguauccuuguacuu

SEQ ID NO: 38401 - RNA, 20 nt, Artificial Sequence
  spacer sequence TTCN PAM
cccugcucucccucgcggag

SEQ ID NO: 38402 - RNA, 20 nt, Artificial Sequence
  spacer sequence TTCN PAM
agcgauucuccugccccagc

SEQ ID NO: 38403 - RNA, 20 nt, Artificial Sequence
  spacer sequence TTCN PAM
ccugccccagccucccgagu

SEQ ID NO: 38404 - RNA, 20 nt, Artificial Sequence
  spacer sequence TTCN PAM
ccauguuggccaggcugguc

SEQ ID NO: 38405 - RNA, 20 nt, Artificial Sequence
  spacer sequence TTCN PAM
agaccagccuggccaacaug

SEQ ID NO: 38406 - RNA, 20 nt, Artificial Sequence
  spacer sequence TTCN PAM
ccauguuggcuaggcugguc

SEQ ID NO: 38407 - RNA, 20 nt, Artificial Sequence
  spacer sequence TTCN PAM
agaccagccuagccaacaug

SEQ ID NO: 38408 - RNA, 20 nt, Artificial Sequence
  spacer sequence TTCN PAM
auuuauggucauaaacuccu

SEQ ID NO: 38409 - RNA, 20 nt, Artificial Sequence
  spacer sequence TTCN PAM
guauucuguagauauuaauu

SEQ ID NO: 38410 - RNA, 20 nt, Artificial Sequence
  spacer sequence TTCN PAM
guagauauuaauuccuauca

SEQ ID NO: 38411 - RNA, 20 nt, Artificial Sequence
  spacer sequence TTCN PAM
uaucagcuccaggaguggaa

SEQ ID NO: 38412 - RNA, 20 nt, Artificial Sequence
  spacer sequence TTCN PAM
acuccuggagcugauaggaa

SEQ ID NO: 38413 - RNA, 20 nt, Artificial Sequence
  spacer sequence TTCN PAM
ccucugcuaauggugaggcu

SEQ ID NO: 38414 - RNA, 20 nt, Artificial Sequence
  spacer sequence TTCN PAM
gagcccacgcggcaccugca

SEQ ID NO: 38415 - RNA, 20 nt, Artificial Sequence
  spacer sequence TTCN PAM
gaccaagguguggucagagg

SEQ ID NO: 38416 - RNA, 20 nt, Artificial Sequence
  spacer sequence TTCN PAM
cacggccuggaccccccucg

SEQ ID NO: 38417 - RNA, 20 nt, Artificial Sequence
  spacer sequence TTCN PAM
ucuggagcuccuacucgacc

SEQ ID NO: 38418 - RNA, 20 nt, Artificial Sequence
  spacer sequence TTCN PAM
gcccgcccgcagagaccccc

SEQ ID NO: 38419 - RNA, 20 nt, Artificial Sequence
  spacer sequence TTCN PAM
uggaggugggugggggucgc

SEQ ID NO: 38420 - RNA, 20 nt, Artificial Sequence
  spacer sequence TTCN PAM
acuucguggagguggguggg

SEQ ID NO: 38421 - RNA, 20 nt, Artificial Sequence
  spacer sequence TTCN PAM
gcccugcuucuacuucgugg

SEQ ID NO: 38422 - RNA, 20 nt, Artificial Sequence
  spacer sequence TTCN PAM
ggaucuuguucuucuccuug

SEQ ID NO: 38423 - RNA, 20 nt, Artificial Sequence
  spacer sequence TTCN PAM
ucuccuugguggagaucaug

SEQ ID NO: 38424 - RNA, 20 nt, Artificial Sequence
  spacer sequence TTCN PAM
ccuugguggagaucauggug

SEQ ID NO: 38425 - RNA, 20 nt, Artificial Sequence
  spacer sequence TTCN PAM
ccccuccagccacggccugc

SEQ ID NO: 38426 - RNA, 20 nt, Artificial Sequence
  spacer sequence TTCN PAM
ccgaccgccccucccccgcc

SEQ ID NO: 38427 - RNA, 20 nt, Artificial Sequence
  spacer sequence TTCN PAM
gggcgccccuacacccggga

SEQ ID NO: 38428 - RNA, 20 nt, Artificial Sequence
  spacer sequence TTCN PAM
cccggaugccccccaccacc

SEQ ID NO: 38429 - RNA, 20 nt, Artificial Sequence
  spacer sequence TTCN PAM
gggcggcggaggagacuggg

SEQ ID NO: 38430 - RNA, 20 nt, Artificial Sequence
  spacer sequence TTCN PAM
cggcucccggccccgcccca

SEQ ID NO: 38431 - RNA, 20 nt, Artificial Sequence
  spacer sequence TTCN PAM
ggccugcggcggugacgguc

SEQ ID NO: 38432 - RNA, 20 nt, Artificial Sequence
  spacer sequence TTCN PAM
gggucucugacugucuccgu

SEQ ID NO: 38433 - RNA, 20 nt, Artificial Sequence
  spacer sequence TTCN PAM
auggcgaggcucccagggcg

SEQ ID NO: 38434 - RNA, 20 nt, Artificial Sequence
  spacer sequence TTCN PAM
ccccgcacucacccucgccc

SEQ ID NO: 38435 - RNA, 20 nt, Artificial Sequence
  spacer sequence TTCN PAM
uccuccauaugcgcagcccu

SEQ ID NO: 38436 - RNA, 20 nt, Artificial Sequence
  spacer sequence TTCN PAM
ccaucccuacaacggggguc

SEQ ID NO: 38437 - RNA, 20 nt, Artificial Sequence
  spacer sequence TTCN PAM
agaccagccuggacaacaug

SEQ ID NO: 38438 - RNA, 20 nt, Artificial Sequence
  spacer sequence TTCN PAM
ccauguuguccaggcugguc

SEQ ID NO: 38439 - RNA, 20 nt, Artificial Sequence
  spacer sequence TTCN PAM
agaccagccuggccaacaug

SEQ ID NO: 38440 - RNA, 20 nt, Artificial Sequence
  spacer sequence TTCN PAM
ccauguuggccaggcugguc

SEQ ID NO: 38441 - RNA, 20 nt, Artificial Sequence
  spacer sequence TTCN PAM
ccugccucagccucccaucu

SEQ ID NO: 38442 - RNA, 20 nt, Artificial Sequence
  spacer sequence TTCN PAM
agcaauucuccugccucagc

SEQ ID NO: 38443 - RNA, 20 nt, Artificial Sequence
  spacer sequence TTCN PAM
gucgcccaggcuggagggca

SEQ ID NO: 38444 - RNA, 20 nt, Artificial Sequence
  spacer sequence TTCN PAM
cgggggcagcagugccuguu

SEQ ID NO: 38445 - RNA, 20 nt, Artificial Sequence
  spacer sequence TTCN PAM
gcauuuauggcaggcgaccc

SEQ ID NO: 38446 - RNA, 20 nt, Artificial Sequence
  spacer sequence TTCN PAM
caucgccauuuaacuguuuc

SEQ ID NO: 38447 - RNA, 20 nt, Artificial Sequence
  spacer sequence TTCN PAM
cauccuauucccaucgccau

SEQ ID NO: 38448 - RNA, 20 nt, Artificial Sequence
  spacer sequence TTCN PAM
ugggacaggacugcacggac

SEQ ID NO: 38449 - RNA, 20 nt, Artificial Sequence
  spacer sequence TTCN PAM
ugcaggggggcucggggagg

SEQ ID NO: 38450 - RNA, 20 nt, Artificial Sequence
  spacer sequence TTCN PAM
augcgauccuguuccucccc

SEQ ID NO: 38451 - RNA, 20 nt, Artificial Sequence
  spacer sequence TTCN PAM
uccccaacagcccuggagaa

SEQ ID NO: 38452 - RNA, 20 nt, Artificial Sequence
  spacer sequence TTCN PAM
ccagggcuguuggggaggaa

SEQ ID NO: 38453 - RNA, 20 nt, Artificial Sequence
  spacer sequence TTCN PAM
uggccugugagaggcggggc

SEQ ID NO: 38454 - RNA, 20 nt, Artificial Sequence
  spacer sequence TTCN PAM
caacggccacucuggccccg

SEQ ID NO: 38455 - RNA, 20 nt, Artificial Sequence
  spacer sequence TTCN PAM
uccuccucccccagagagcu

SEQ ID NO: 38456 - RNA, 20 nt, Artificial Sequence
  spacer sequence TTCN PAM
ggagccuucugaggucagga

SEQ ID NO: 38457 - RNA, 20 nt, Artificial Sequence
  spacer sequence TTCN PAM
gaggucaggagugggagagu

SEQ ID NO: 38458 - RNA, 20 nt, Artificial Sequence
  spacer sequence TTCN PAM
guuggacccccaagcugcca

SEQ ID NO: 38459 - RNA, 20 nt, Artificial Sequence
  spacer sequence TTCN PAM
cccccuaggaucaccagugg

SEQ ID NO: 38460 - RNA, 20 nt, Artificial Sequence
  spacer sequence TTCN PAM
gagcaggccggagggguuga

SEQ ID NO: 38461 - RNA, 20 nt, Artificial Sequence
  spacer sequence TTCN PAM
gcucacugcaaccucccacc

SEQ ID NO: 38462 - RNA, 20 nt, Artificial Sequence
  spacer sequence TTCN PAM
agugauucucccuccucagc

SEQ ID NO: 38463 - RNA, 20 nt, Artificial Sequence
  spacer sequence TTCN PAM
cccuccucagccucccgagu

SEQ ID NO: 38464 - RNA, 20 nt, Artificial Sequence
  spacer sequence TTCN PAM
acuaaaaauacaaaaauuag

SEQ ID NO: 38465 - RNA, 20 nt, Artificial Sequence
  spacer sequence TTCN PAM
cgccauucuccugccucagc

SEQ ID NO: 38466 - RNA, 20 nt, Artificial Sequence
  spacer sequence TTCN PAM
ccugccucagccucccgagu

SEQ ID NO: 38467 - RNA, 20 nt, Artificial Sequence
  spacer sequence TTCN PAM
uuuguauuuuuaguagagac

SEQ ID NO: 38468 - RNA, 20 nt, Artificial Sequence
  spacer sequence TTCN PAM
ccguguuagccaggaugguc

SEQ ID NO: 38469 - RNA, 20 nt, Artificial Sequence
  spacer sequence TTCN PAM
ccucugccgggagccggaag

SEQ ID NO: 38470 - RNA, 20 nt, Artificial Sequence
  spacer sequence TTCN PAM
ccuuggaaaugagccccuuu

SEQ ID NO: 38471 - RNA, 20 nt, Artificial Sequence
  spacer sequence TTCN PAM
aaggugaaacugaggucugg

SEQ ID NO: 38472 - RNA, 20 nt, Artificial Sequence
  spacer sequence TTCN PAM
uggccuccauucagaaucaa

SEQ ID NO: 38473 - RNA, 20 nt, Artificial Sequence
  spacer sequence TTCN PAM
gaaucaaggcaggcacuucu

SEQ ID NO: 38474 - RNA, 20 nt, Artificial Sequence
  spacer sequence TTCN PAM
gaauggaggccaggaacggg

SEQ ID NO: 38475 - RNA, 20 nt, Artificial Sequence
  spacer sequence TTCN PAM
gcgggggugcccugauccau

SEQ ID NO: 38476 - RNA, 20 nt, Artificial Sequence
  spacer sequence TTCN PAM
ugaugaccgcggccagcugc

SEQ ID NO: 38477 - RNA, 20 nt, Artificial Sequence
  spacer sequence TTCN PAM
cugcaccuccuccaucugag

SEQ ID NO: 38478 - RNA, 20 nt, Artificial Sequence
  spacer sequence TTCN PAM
uucacugcaccuccuccauc

SEQ ID NO: 38479 - RNA, 20 nt, Artificial Sequence
  spacer sequence TTCN PAM
cugggccucccccaucugac

SEQ ID NO: 38480 - RNA, 20 nt, Artificial Sequence
  spacer sequence TTCN PAM
cuucucugggccucccccau

SEQ ID NO: 38481 - RNA, 20 nt, Artificial Sequence
  spacer sequence TTCN PAM
agggcccccuucccaucuug

SEQ ID NO: 38482 - RNA, 20 nt, Artificial Sequence
  spacer sequence TTCN PAM
guaaaagcgggggaguuuuc

SEQ ID NO: 38483 - RNA, 20 nt, Artificial Sequence
  spacer sequence TTCN PAM
gggugaaggauugcagucug

SEQ ID NO: 38484 - RNA, 20 nt, Artificial Sequence
  spacer sequence TTCN PAM
cccugaaaacucccccgcuu

SEQ ID NO: 38485 - RNA, 20 nt, Artificial Sequence
  spacer sequence TTCN PAM
uccgcuacucucaggaaccc

SEQ ID NO: 38486 - RNA, 20 nt, Artificial Sequence
  spacer sequence TTCN PAM
ugagaguagcggaggaaagg

SEQ ID NO: 38487 - RNA, 20 nt, Artificial Sequence
  spacer sequence TTCN PAM
gcugggggucguagccauuc

SEQ ID NO: 38488 - RNA, 20 nt, Artificial Sequence
  spacer sequence TTCN PAM
gguucugcugggggucguag

SEQ ID NO: 38489 - RNA, 20 nt, Artificial Sequence
  spacer sequence TTCN PAM
ggugagaggauggugccacc

SEQ ID NO: 38490 - RNA, 20 nt, Artificial Sequence
  spacer sequence TTCN PAM
uuccccagcuggaccgugag

SEQ ID NO: 38491 - RNA, 20 nt, Artificial Sequence
  spacer sequence TTCN PAM
ccagcuggaccgugaggcca

SEQ ID NO: 38492 - RNA, 20 nt, Artificial Sequence
  spacer sequence TTCN PAM
gcagaggcaguggcaguauc

SEQ ID NO: 38493 - RNA, 20 nt, Artificial Sequence
  spacer sequence TTCN PAM
accguggcguucugcagagg

SEQ ID NO: 38494 - RNA, 20 nt, Artificial Sequence
  spacer sequence TTCN PAM
ucacccgaguggcgcucuuc

SEQ ID NO: 38495 - RNA, 20 nt, Artificial Sequence
  spacer sequence TTCN PAM
cccgaguggcgcucuuccga

SEQ ID NO: 38496 - RNA, 20 nt, Artificial Sequence
  spacer sequence TTCN PAM
gagacuggaucgaugguguu

SEQ ID NO: 38497 - RNA, 20 nt, Artificial Sequence
  spacer sequence TTCN PAM
caacaacccgggaccggggc

SEQ ID NO: 38498 - RNA, 20 nt, Artificial Sequence
  spacer sequence TTCN PAM
cggcugcguccuguugccac

SEQ ID NO: 38499 - RNA, 20 nt, Artificial Sequence
  spacer sequence TTCN PAM
ggaggcugaggcaggagaau

SEQ ID NO: 38500 - RNA, 20 nt, Artificial Sequence
  spacer sequence TTCN PAM
ccugccucagccuccugaau

SEQ ID NO: 38501 - RNA, 20 nt, Artificial Sequence
  spacer sequence TTCN PAM
cuccucuacuacuuucuuuu

SEQ ID NO: 38502 - RNA, 20 nt, Artificial Sequence
  spacer sequence TTCN PAM
cucuuuuuucucuccucuac

SEQ ID NO: 38503 - RNA, 20 nt, Artificial Sequence
  spacer sequence TTCN PAM
uguucucucuuuuuucucuc

SEQ ID NO: 38504 - RNA, 20 nt, Artificial Sequence
  spacer sequence TTCN PAM
gucucucucugucucugugu

SEQ ID NO: 38505 - RNA, 20 nt, Artificial Sequence
  spacer sequence TTCN PAM
ucucugugucugugucugug

SEQ ID NO: 38506 - RNA, 20 nt, Artificial Sequence
  spacer sequence TTCN PAM
cugucucugucucugucucc

SEQ ID NO: 38507 - RNA, 20 nt, Artificial Sequence
  spacer sequence TTCN PAM
gucuccuucucugucucugu

SEQ ID NO: 38508 - RNA, 20 nt, Artificial Sequence
  spacer sequence TTCN PAM
uguaccaaccguagguggcg

SEQ ID NO: 38509 - RNA, 20 nt, Artificial Sequence
  spacer sequence TTCN PAM
cagcacuuuggcgggauuac

SEQ ID NO: 38510 - RNA, 20 nt, Artificial Sequence
  spacer sequence TTCN PAM
agaccagccuggccaauaua

SEQ ID NO: 38511 - RNA, 20 nt, Artificial Sequence
  spacer sequence TTCN PAM
cuauauuggccaggcugguc

SEQ ID NO: 38512 - RNA, 20 nt, Artificial Sequence
  spacer sequence TTCN PAM
cgcuuacagaaguccaaagg

SEQ ID NO: 38513 - RNA, 20 nt, Artificial Sequence
  spacer sequence TTCN PAM
aaaugaaacguuaaaaagcu

SEQ ID NO: 38514 - RNA, 20 nt, Artificial Sequence
  spacer sequence TTCN PAM
uuuggaaaggauuucacgcu

SEQ ID NO: 38515 - RNA, 20 nt, Artificial Sequence
  spacer sequence TTCN PAM
uuuuggccuccaaguucauu

SEQ ID NO: 38516 - RNA, 20 nt, Artificial Sequence
  spacer sequence TTCN PAM
uucagugcuucucuccauuu

SEQ ID NO: 38517 - RNA, 20 nt, Artificial Sequence
  spacer sequence TTCN PAM
gugcuucucuccauuucacu

SEQ ID NO: 38518 - RNA, 20 nt, Artificial Sequence
  spacer sequence TTCN PAM
cuccauuucacuguagguuu

SEQ ID NO: 38519 - RNA, 20 nt, Artificial Sequence
  spacer sequence TTCN PAM
gcccccaggggucccugugu

SEQ ID NO: 38520 - RNA, 20 nt, Artificial Sequence
  spacer sequence TTCN PAM
acagaccccaagagacucug

SEQ ID NO: 38521 - RNA, 20 nt, Artificial Sequence
  spacer sequence TTCN PAM
augugugcagccuccuggga

SEQ ID NO: 38522 - RNA, 20 nt, Artificial Sequence
  spacer sequence TTCN PAM
gacucccaggcucccaaggc

SEQ ID NO: 38523 - RNA, 20 nt, Artificial Sequence
  spacer sequence TTCN PAM
uccuuuugccuugggagccu

SEQ ID NO: 38524 - RNA, 20 nt, Artificial Sequence
  spacer sequence TTCN PAM
ggcacagcuggggaaacuga

SEQ ID NO: 38525 - RNA, 20 nt, Artificial Sequence
  spacer sequence TTCN PAM
ccagcugugccagaagggcu

SEQ ID NO: 38526 - RNA, 20 nt, Artificial Sequence
  spacer sequence TTCN PAM
ccugauuccagcaucacuaa

SEQ ID NO: 38527 - RNA, 20 nt, Artificial Sequence
  spacer sequence TTCN PAM
uccccugauuccagcaucac

SEQ ID NO: 38528 - RNA, 20 nt, Artificial Sequence
  spacer sequence TTCN PAM
uuuucuuuuucuuuuuuuuu

SEQ ID NO: 38529 - RNA, 20 nt, Artificial Sequence
  spacer sequence TTCN PAM
uuuucuuuuuuuuuuuuuug

SEQ ID NO: 38530 - RNA, 20 nt, Artificial Sequence
  spacer sequence TTCN PAM
uuuuuuuuuuuuugagacgg

SEQ ID NO: 38531 - RNA, 20 nt, Artificial Sequence
  spacer sequence TTCN PAM
cgccuuucuccugccucagc

SEQ ID NO: 38532 - RNA, 20 nt, Artificial Sequence
  spacer sequence TTCN PAM
ccugccucagccucccgagu

SEQ ID NO: 38533 - RNA, 20 nt, Artificial Sequence
  spacer sequence TTCN PAM
agguguuagccaggaugguc

SEQ ID NO: 38534 - RNA, 20 nt, Artificial Sequence
  spacer sequence TTCN PAM
cccgcaucugcagggaggcc

SEQ ID NO: 38535 - RNA, 20 nt, Artificial Sequence
  spacer sequence TTCN PAM
gcggaggcaccuugauccac

SEQ ID NO: 38536 - RNA, 20 nt, Artificial Sequence
  spacer sequence TTCN PAM
ugcugacggccgcgcacugc

SEQ ID NO: 38537 - RNA, 20 nt, Artificial Sequence
  spacer sequence TTCN PAM
cgguggcucagguguuucug

SEQ ID NO: 38538 - RNA, 20 nt, Artificial Sequence
  spacer sequence TTCN PAM
gaacaacuacgacgcggaga

SEQ ID NO: 38539 - RNA, 20 nt, Artificial Sequence
  spacer sequence TTCN PAM
gaaacaccugagccaccgag

SEQ ID NO: 38540 - RNA, 20 nt, Artificial Sequence
  spacer sequence TTCN PAM
ccgcgucguaguuguucaga

SEQ ID NO: 38541 - RNA, 20 nt, Artificial Sequence
  spacer sequence TTCN PAM
guuuguucuccgcgucguag

SEQ ID NO: 38542 - RNA, 20 nt, Artificial Sequence
  spacer sequence TTCN PAM
ccucauccaggugggcgggc

SEQ ID NO: 38543 - RNA, 20 nt, Artificial Sequence
  spacer sequence TTCN PAM
aguaauucuccugccucagc

SEQ ID NO: 38544 - RNA, 20 nt, Artificial Sequence
  spacer sequence TTCN PAM
ccugccucagccuccugagu

SEQ ID NO: 38545 - RNA, 20 nt, Artificial Sequence
  spacer sequence TTCN PAM
agaccagccuggccaacgug

SEQ ID NO: 38546 - RNA, 20 nt, Artificial Sequence
  spacer sequence TTCN PAM
uuugagauggagucuugcuc

SEQ ID NO: 38547 - RNA, 20 nt, Artificial Sequence
  spacer sequence TTCN PAM
uucuuuugagauggagucuu

SEQ ID NO: 38548 - RNA, 20 nt, Artificial Sequence
  spacer sequence TTCN PAM
uucuuucuuuugagauggag

SEQ ID NO: 38549 - RNA, 20 nt, Artificial Sequence
  spacer sequence TTCN PAM
uucuuucuuucuuuugagau

SEQ ID NO: 38550 - RNA, 20 nt, Artificial Sequence
  spacer sequence TTCN PAM
uuccuucuuucuuucuuuug

SEQ ID NO: 38551 - RNA, 20 nt, Artificial Sequence
  spacer sequence TTCN PAM
uuuucuuuccuucuuucuuu

SEQ ID NO: 38552 - RNA, 20 nt, Artificial Sequence
  spacer sequence TTCN PAM
uucauuuucuuuccuucuuu

SEQ ID NO: 38553 - RNA, 20 nt, Artificial Sequence
  spacer sequence TTCN PAM
gccccagcugagcagcccag

SEQ ID NO: 38554 - RNA, 20 nt, Artificial Sequence
  spacer sequence TTCN PAM
ucugccggccacauaacauu

SEQ ID NO: 38555 - RNA, 20 nt, Artificial Sequence
  spacer sequence TTCN PAM
gccggccacauaacauuugc

SEQ ID NO: 38556 - RNA, 20 nt, Artificial Sequence
  spacer sequence TTCN PAM
ucccucgccgcaaggccggc

SEQ ID NO: 38557 - RNA, 20 nt, Artificial Sequence
  spacer sequence TTCN PAM
uaaguaaccgugcccccacc

SEQ ID NO: 38558 - RNA, 20 nt, Artificial Sequence
  spacer sequence TTCN PAM
uaggaacugggcauuuaugg

SEQ ID NO: 38559 - RNA, 20 nt, Artificial Sequence
  spacer sequence TTCN PAM
cucgagacagggucucgcuc

SEQ ID NO: 38560 - RNA, 20 nt, Artificial Sequence
  spacer sequence TTCN PAM
ccugccucggccucccgagu

SEQ ID NO: 38561 - RNA, 20 nt, Artificial Sequence
  spacer sequence TTCN PAM
agugauucuccugccucggc

SEQ ID NO: 38562 - RNA, 20 nt, Artificial Sequence
  spacer sequence TTCN PAM
uuggaugaugccaucacaga

SEQ ID NO: 38563 - RNA, 20 nt, Artificial Sequence
  spacer sequence TTCN PAM
ugaucuggggaugugccacc

SEQ ID NO: 38564 - RNA, 20 nt, Artificial Sequence
  spacer sequence TTCN PAM
cugacuucuucacgcgggua

SEQ ID NO: 38565 - RNA, 20 nt, Artificial Sequence
  spacer sequence TTCN PAM
ucacgcggguagcccucuac

SEQ ID NO: 38566 - RNA, 20 nt, Artificial Sequence
  spacer sequence TTCN PAM
cgcggguagcccucuacgug

SEQ ID NO: 38567 - RNA, 20 nt, Artificial Sequence
  spacer sequence TTCN PAM
acgcugcgccguguggaggc

SEQ ID NO: 38568 - RNA, 20 nt, Artificial Sequence
  spacer sequence TTCN PAM
uuuuaauauuuuuuugagac

SEQ ID NO: 38569 - RNA, 20 nt, Artificial Sequence
  spacer sequence TTCN PAM
uaguuuuuguagagacgggg

SEQ ID NO: 38570 - RNA, 20 nt, Artificial Sequence
  spacer sequence TTCN PAM
uauguaaagagucacugagg

SEQ ID NO: 38571 - RNA, 20 nt, Artificial Sequence
  spacer sequence TTCN PAM
uccucuguaaaauuauaauc

SEQ ID NO: 38572 - RNA, 20 nt, Artificial Sequence
  spacer sequence TTCN PAM
ggggccugaaguuacacagu

SEQ ID NO: 38573 - RNA, 20 nt, Artificial Sequence
  spacer sequence TTCN PAM
ggccccugaaauaaacucuc

SEQ ID NO: 38574 - RNA, 20 nt, Artificial Sequence
  spacer sequence TTCN PAM
uggagacaggcccguugguu

SEQ ID NO: 38575 - RNA, 20 nt, Artificial Sequence
  spacer sequence TTCN PAM
cuuccccuccccuuguccug

SEQ ID NO: 38576 - RNA, 20 nt, Artificial Sequence
  spacer sequence TTCN PAM
ccuccccuuguccuggagcc

SEQ ID NO: 38577 - RNA, 20 nt, Artificial Sequence
  spacer sequence TTCN PAM
ugcgacagccuuggcccggc

SEQ ID NO: 38578 - RNA, 20 nt, Artificial Sequence
  spacer sequence TTCN PAM
agcugcaacggccgggccaa

SEQ ID NO: 38579 - RNA, 20 nt, Artificial Sequence
  spacer sequence TTCN PAM
ucaacgcccugugccagggg

SEQ ID NO: 38580 - RNA, 20 nt, Artificial Sequence
  spacer sequence TTCN PAM
ucuccccuggcacagggcgu

SEQ ID NO: 38581 - RNA, 20 nt, Artificial Sequence
  spacer sequence TTCN PAM
ucgccuguguccugccggcc

SEQ ID NO: 38582 - RNA, 20 nt, Artificial Sequence
  spacer sequence TTCN PAM
uggugucccugcagcugcgc

SEQ ID NO: 38583 - RNA, 20 nt, Artificial Sequence
  spacer sequence TTCN PAM
gcggcgccacccugauugcg

SEQ ID NO: 38584 - RNA, 20 nt, Artificial Sequence
  spacer sequence TTCN PAM
ucaugucggccgcgcacugc

SEQ ID NO: 38585 - RNA, 20 nt, Artificial Sequence
  spacer sequence TTCN PAM
ccacgcagugcgcggccgac

SEQ ID NO: 38586 - RNA, 20 nt, Artificial Sequence
  spacer sequence TTCN PAM
gccggggagggagaggcggg

SEQ ID NO: 38587 - RNA, 20 nt, Artificial Sequence
  spacer sequence TTCN PAM
ccgugcagcgcaucuucgaa

SEQ ID NO: 38588 - RNA, 20 nt, Artificial Sequence
  spacer sequence TTCN PAM
aaaacggcuacgaccccgua

SEQ ID NO: 38589 - RNA, 20 nt, Artificial Sequence
  spacer sequence TTCN PAM
aagaugcgcugcacggcgaa

SEQ ID NO: 38590 - RNA, 20 nt, Artificial Sequence
  spacer sequence TTCN PAM
ccaggugccgccgggcgggg

SEQ ID NO: 38591 - RNA, 20 nt, Artificial Sequence
  spacer sequence TTCN PAM
caguaaguuuguugauugac

SEQ ID NO: 38592 - RNA, 20 nt, Artificial Sequence
  spacer sequence TTCN PAM
caguaaguuuguugauugac

SEQ ID NO: 38593 - RNA, 20 nt, Artificial Sequence
  spacer sequence TTCN PAM
caguaaguuuguugauugac

SEQ ID NO: 38594 - RNA, 20 nt, Artificial Sequence
  spacer sequence TTCN PAM
caguaaguuuguugauugac

SEQ ID NO: 38595 - RNA, 20 nt, Artificial Sequence
  spacer sequence TTCN PAM
gggcaggaaccgugggaucg

SEQ ID NO: 38596 - RNA, 20 nt, Artificial Sequence
  spacer sequence TTCN PAM
ugcccagaaggccccagccc

SEQ ID NO: 38597 - RNA, 20 nt, Artificial Sequence
  spacer sequence TTCN PAM
uacgugcccugggugucccu

SEQ ID NO: 38598 - RNA, 20 nt, Artificial Sequence
  spacer sequence TTCN PAM
ccaccuugucugccuccaca

SEQ ID NO: 38599 - RNA, 20 nt, Artificial Sequence
  spacer sequence TTCN PAM
guggauuagcccguugcaga

SEQ ID NO: 38600 - RNA, 20 nt, Artificial Sequence
  spacer sequence TTCN PAM
uccggggaggcugcgccuca

SEQ ID NO: 38601 - RNA, 20 nt, Artificial Sequence
  spacer sequence TTCN PAM
cuguuuuguagaauguguuu

SEQ ID NO: 38602 - RNA, 20 nt, Artificial Sequence
  spacer sequence TTCN PAM
acaaaacagagaauguuuau

SEQ ID NO: 38603 - RNA, 20 nt, Artificial Sequence
  spacer sequence TTCN PAM
gcuccauugcccuggcugug

SEQ ID NO: 38604 - RNA, 20 nt, Artificial Sequence
  spacer sequence TTCN PAM
ccacauuguguuuuuuucuu

SEQ ID NO: 38605 - RNA, 20 nt, Artificial Sequence
  spacer sequence TTCN PAM
uuuuuguuuuuagauggagu

SEQ ID NO: 38606 - RNA, 20 nt, Artificial Sequence
  spacer sequence TTCN PAM
cgccauucuccugccucagc

SEQ ID NO: 38607 - RNA, 20 nt, Artificial Sequence
  spacer sequence TTCN PAM
ccugccucagccucccgagu

SEQ ID NO: 38608 - RNA, 20 nt, Artificial Sequence
  spacer sequence TTCN PAM
ccguguuagccaggaugguc

SEQ ID NO: 38609 - RNA, 20 nt, Artificial Sequence
  spacer sequence TTCN PAM
ggagaucgagaccauccugg

SEQ ID NO: 38610 - RNA, 20 nt, Artificial Sequence
  spacer sequence TTCN PAM
auucucugugcguaugaaau

SEQ ID NO: 38611 - RNA, 20 nt, Artificial Sequence
  spacer sequence TTCN PAM
cugugcguaugaaauaaucc

SEQ ID NO: 38612 - RNA, 20 nt, Artificial Sequence
  spacer sequence TTCN PAM
uacgcacagagaauagaaaa

SEQ ID NO: 38613 - RNA, 20 nt, Artificial Sequence
  spacer sequence TTCN PAM
ucacuccagccaagucucaa

SEQ ID NO: 38614 - RNA, 20 nt, Artificial Sequence
  spacer sequence TTCN PAM
uccucacuccagccaagucu

SEQ ID NO: 38615 - RNA, 20 nt, Artificial Sequence
  spacer sequence TTCN PAM
ggcuucuccuuucuucucug

SEQ ID NO: 38616 - RNA, 20 nt, Artificial Sequence
  spacer sequence TTCN PAM
ggcaccuggaucaagccaca

SEQ ID NO: 38617 - RNA, 20 nt, Artificial Sequence
  spacer sequence TTCN PAM
gguguggcuugauccaggug

SEQ ID NO: 38618 - RNA, 20 nt, Artificial Sequence
  spacer sequence TTCN PAM
gggauguccgccuucaggug

SEQ ID NO: 38619 - RNA, 20 nt, Artificial Sequence
  spacer sequence TTCN PAM
auauaacuuucaugauucag

SEQ ID NO: 38620 - RNA, 20 nt, Artificial Sequence
  spacer sequence TTCN PAM
ugauucaggcuccacccagu

SEQ ID NO: 38621 - RNA, 20 nt, Artificial Sequence
  spacer sequence TTCN PAM
cucuaauauagaggaggaaa

SEQ ID NO: 38622 - RNA, 20 nt, Artificial Sequence
  spacer sequence TTCN PAM
uccucuauauuagagagaag

SEQ ID NO: 38623 - RNA, 20 nt, Artificial Sequence
  spacer sequence TTCN PAM
uuuccuccucuauauuagag

SEQ ID NO: 38624 - RNA, 20 nt, Artificial Sequence
  spacer sequence TTCN PAM
uguccugcuacccucccuuc

SEQ ID NO: 38625 - RNA, 20 nt, Artificial Sequence
  spacer sequence TTCN PAM
caauccuagcuggaggccac

SEQ ID NO: 38626 - RNA, 20 nt, Artificial Sequence
  spacer sequence TTCN PAM
gguccuccuaggagcggccg

SEQ ID NO: 38627 - RNA, 20 nt, Artificial Sequence
  spacer sequence TTCN PAM
gcugcaccgacgccauguag

SEQ ID NO: 38628 - RNA, 20 nt, Artificial Sequence
  spacer sequence TTCN PAM
cccgcgcggcgcgggcacuc

SEQ ID NO: 38629 - RNA, 20 nt, Artificial Sequence
  spacer sequence TTCN PAM
cgucggcccuggggaccgga

SEQ ID NO: 38630 - RNA, 20 nt, Artificial Sequence
  spacer sequence TTCN PAM
ccugggcgcgcacucccugu

SEQ ID NO: 38631 - RNA, 20 nt, Artificial Sequence
  spacer sequence TTCN PAM
ccgacagcugaggguggagg

SEQ ID NO: 38632 - RNA, 20 nt, Artificial Sequence
  spacer sequence TTCN PAM
cggugccacgucgcggucca

SEQ ID NO: 38633 - RNA, 20 nt, Artificial Sequence
  spacer sequence TTCN PAM
ggccugggaggagacgcggg

SEQ ID NO: 38634 - RNA, 20 nt, Artificial Sequence
  spacer sequence TTCN PAM
cggggccugcaggccccgcg

SEQ ID NO: 38635 - RNA, 20 nt, Artificial Sequence
  spacer sequence TTCN PAM
ggcagggugacuccgggggc

SEQ ID NO: 38636 - RNA, 20 nt, Artificial Sequence
  spacer sequence TTCN PAM
ugcgguugccgcaaacgcgc

SEQ ID NO: 38637 - RNA, 20 nt, Artificial Sequence
  spacer sequence TTCN PAM
ggccccggcacccuaggcca

SEQ ID NO: 38638 - RNA, 20 nt, Artificial Sequence
  spacer sequence TTCN PAM
uugcucgggacuuuguugcu

SEQ ID NO: 38639 - RNA, 20 nt, Artificial Sequence
  spacer sequence TTCN PAM
agcuauccuccugccucagc

SEQ ID NO: 38640 - RNA, 20 nt, Artificial Sequence
  spacer sequence TTCN PAM
ggggccgggagaucagaguc

SEQ ID NO: 38641 - RNA, 20 nt, Artificial Sequence
  spacer sequence TTCN PAM
auguggcucugcagagacca

SEQ ID NO: 38642 - RNA, 20 nt, Artificial Sequence
  spacer sequence TTCN PAM
gcauuuauggggcaccuagu

SEQ ID NO: 38643 - RNA, 20 nt, Artificial Sequence
  spacer sequence TTCN PAM
ugauccagcgcugcucccac

SEQ ID NO: 38644 - RNA, 20 nt, Artificial Sequence
  spacer sequence TTCN PAM
ccgccgugguucuguugggc

SEQ ID NO: 38645 - RNA, 20 nt, Artificial Sequence
  spacer sequence TTCN PAM
guugggcgacuugagcaugg

SEQ ID NO: 38646 - RNA, 20 nt, Artificial Sequence
  spacer sequence TTCN PAM
cacuuccaggcgggccuccc

SEQ ID NO: 38647 - RNA, 20 nt, Artificial Sequence
  spacer sequence TTCN PAM
aggcgggccucccuuacgcc

SEQ ID NO: 38648 - RNA, 20 nt, Artificial Sequence
  spacer sequence TTCN PAM
gggggccccucaccuggugc

SEQ ID NO: 38649 - RNA, 20 nt, Artificial Sequence
  spacer sequence TTCN PAM
uccguggggcaagcgccaag

SEQ ID NO: 38650 - RNA, 20 nt, Artificial Sequence
  spacer sequence TTCN PAM
ccccucucccgccagggccc

SEQ ID NO: 38651 - RNA, 20 nt, Artificial Sequence
  spacer sequence TTCN PAM
ucugcaguuuggccgggcgc

SEQ ID NO: 38652 - RNA, 20 nt, Artificial Sequence
  spacer sequence TTCN PAM
uccaccagcgccucguccgg

SEQ ID NO: 38653 - RNA, 20 nt, Artificial Sequence
  spacer sequence TTCN PAM
gccaccucucuccgcagguc

SEQ ID NO: 38654 - RNA, 20 nt, Artificial Sequence
  spacer sequence TTCN PAM
gccugcucaccaagcucugg

SEQ ID NO: 38655 - RNA, 20 nt, Artificial Sequence
  spacer sequence TTCN PAM
gaaggccccagaugcggaug

SEQ ID NO: 38656 - RNA, 20 nt, Artificial Sequence
  spacer sequence TTCN PAM
gaagcccagcugccugcccg

SEQ ID NO: 38657 - RNA, 20 nt, Artificial Sequence
  spacer sequence TTCN PAM
cgaagcaugcccagcgaggu

SEQ ID NO: 38658 - RNA, 20 nt, Artificial Sequence
  spacer sequence TTCN PAM
ggaauugaugguggucaucc

SEQ ID NO: 38659 - RNA, 20 nt, Artificial Sequence
  spacer sequence TTCN PAM
gcgggacggcaccucgcugg

SEQ ID NO: 38660 - RNA, 20 nt, Artificial Sequence
  spacer sequence TTCN PAM
cugcugaggccgggccacag

SEQ ID NO: 38661 - RNA, 20 nt, Artificial Sequence
  spacer sequence TTCN PAM
ggcaggguucccugcugagg

SEQ ID NO: 38662 - RNA, 20 nt, Artificial Sequence
  spacer sequence TTCN PAM
gcggcuugugcgccccugac

SEQ ID NO: 38663 - RNA, 20 nt, Artificial Sequence
  spacer sequence TTCN PAM
guucugcggcuugugcgccc

SEQ ID NO: 38664 - RNA, 20 nt, Artificial Sequence
  spacer sequence TTCN PAM
gcugcugcugcccccacccc

SEQ ID NO: 38665 - RNA, 20 nt, Artificial Sequence
  spacer sequence TTCN PAM
ccuugcuucugcugcugcug

SEQ ID NO: 38666 - RNA, 20 nt, Artificial Sequence
  spacer sequence TTCN PAM
uguagggguggggcugagaa

SEQ ID NO: 38667 - RNA, 20 nt, Artificial Sequence
  spacer sequence TTCN PAM
cagccccaccccuacacgaa

SEQ ID NO: 38668 - RNA, 20 nt, Artificial Sequence
  spacer sequence TTCN PAM
ugcuguaccugcuggccagc

SEQ ID NO: 38669 - RNA, 20 nt, Artificial Sequence
  spacer sequence TTCN PAM
uguccagcacaaauuccucc

SEQ ID NO: 38670 - RNA, 20 nt, Artificial Sequence
  spacer sequence TTCN PAM
uccgucuugagguugaucau

SEQ ID NO: 38671 - RNA, 20 nt, Artificial Sequence
  spacer sequence TTCN PAM
ucuauuuauuuuauuuuuau

SEQ ID NO: 38672 - RNA, 20 nt, Artificial Sequence
  spacer sequence TTCN PAM
uucaucuauuuauuuuauuu

SEQ ID NO: 38673 - RNA, 20 nt, Artificial Sequence
  spacer sequence TTCN PAM
acgcccggggccucgagguu

SEQ ID NO: 38674 - RNA, 20 nt, Artificial Sequence
  spacer sequence TTCN PAM
caacacgccugacaagagcc

SEQ ID NO: 38675 - RNA, 20 nt, Artificial Sequence
  spacer sequence TTCN PAM
ggguggagcugauggcgaug

SEQ ID NO: 38676 - RNA, 20 nt, Artificial Sequence
  spacer sequence TTCN PAM
ucaucgccaucagcuccacc

SEQ ID NO: 38677 - RNA, 20 nt, Artificial Sequence
  spacer sequence TTCN PAM
uggccaggauccggguggag

SEQ ID NO: 38678 - RNA, 20 nt, Artificial Sequence
  spacer sequence TTCN PAM
ugcccucagguccucuccac

SEQ ID NO: 38679 - RNA, 20 nt, Artificial Sequence
  spacer sequence TTCN PAM
ccucagcuggagccuuggcg

SEQ ID NO: 38680 - RNA, 20 nt, Artificial Sequence
  spacer sequence TTCN PAM
acucugacaccaggcgcucg

SEQ ID NO: 38681 - RNA, 20 nt, Artificial Sequence
  spacer sequence TTCN PAM
ccaccaggcucuguaccaua

SEQ ID NO: 38682 - RNA, 20 nt, Artificial Sequence
  spacer sequence TTCN PAM
ugcuggaguacugcauggug

SEQ ID NO: 38683 - RNA, 20 nt, Artificial Sequence
  spacer sequence TTCN PAM
augggccacccgcuggaggu

SEQ ID NO: 38684 - RNA, 20 nt, Artificial Sequence
  spacer sequence TTCN PAM
cgugguugucaaugcccacc

SEQ ID NO: 38685 - RNA, 20 nt, Artificial Sequence
  spacer sequence TTCN PAM
ccugguugucaaugcccacc

SEQ ID NO: 38686 - RNA, 20 nt, Artificial Sequence
  spacer sequence TTCN PAM
caugguugucaaugcccacc

SEQ ID NO: 38687 - RNA, 20 nt, Artificial Sequence
  spacer sequence TTCN PAM
ccugguugucaaugcccacc

SEQ ID NO: 38688 - RNA, 20 nt, Artificial Sequence
  spacer sequence TTCN PAM
cguggcugucaauccccacc

SEQ ID NO: 38689 - RNA, 20 nt, Artificial Sequence
  spacer sequence TTCN PAM
uggccggcucauccacaggc

SEQ ID NO: 38690 - RNA, 20 nt, Artificial Sequence
  spacer sequence TTCN PAM
acagcuccgcggccccgagg

SEQ ID NO: 38691 - RNA, 20 nt, Artificial Sequence
  spacer sequence TTCN PAM
acgacggcagcguccacauc

SEQ ID NO: 38692 - RNA, 20 nt, Artificial Sequence
  spacer sequence TTCN PAM
acccuggccucgguacggug

SEQ ID NO: 38693 - RNA, 20 nt, Artificial Sequence
  spacer sequence TTCN PAM
caaauggcggauccuaucgg

SEQ ID NO: 38694 - RNA, 20 nt, Artificial Sequence
  spacer sequence TTCN PAM
guuggcgacaaacagcccac

SEQ ID NO: 38695 - RNA, 20 nt, Artificial Sequence
  spacer sequence TTCN PAM
ugccccugauuuuucaguug

SEQ ID NO: 38696 - RNA, 20 nt, Artificial Sequence
  spacer sequence TTCN PAM
uguuuuccugccccugauuu

SEQ ID NO: 38697 - RNA, 20 nt, Artificial Sequence
  spacer sequence TTCN PAM
agcagaucucccccgugggu

SEQ ID NO: 38698 - RNA, 20 nt, Artificial Sequence
  spacer sequence TTCN PAM
cggggagucccuccuugcgc

SEQ ID NO: 38699 - RNA, 20 nt, Artificial Sequence
  spacer sequence TTCN PAM
ccugcuccgacaugucccgg

SEQ ID NO: 38700 - RNA, 20 nt, Artificial Sequence
  spacer sequence TTCN PAM
uggcccgggacaugucggag

SEQ ID NO: 38701 - RNA, 20 nt, Artificial Sequence
  spacer sequence TTCN PAM
cgccaucacccaccucaagu

SEQ ID NO: 38702 - RNA, 20 nt, Artificial Sequence
  spacer sequence TTCN PAM
ugcgcugcaccaccgaccuc

SEQ ID NO: 38703 - RNA, 20 nt, Artificial Sequence
  spacer sequence TTCN PAM
cgcucaccacgcucacgcac

SEQ ID NO: 38704 - RNA, 20 nt, Artificial Sequence
  spacer sequence TTCN PAM
acaaggugugcgugagcgug

SEQ ID NO: 38705 - RNA, 20 nt, Artificial Sequence
  spacer sequence TTCN PAM
ccggcggcggcaacaucgug

SEQ ID NO: 38706 - RNA, 20 nt, Artificial Sequence
  spacer sequence TTCN PAM
gcagggacacggugaccagg

SEQ ID NO: 38707 - RNA, 20 nt, Artificial Sequence
  spacer sequence TTCN PAM
gcggcaagcccauggagggc

SEQ ID NO: 38708 - RNA, 20 nt, Artificial Sequence
  spacer sequence TTCN PAM
caccgucgcucacgcuguuc

SEQ ID NO: 38709 - RNA, 20 nt, Artificial Sequence
  spacer sequence TTCN PAM
cccgagucaaguucucaccg

SEQ ID NO: 38710 - RNA, 20 nt, Artificial Sequence
  spacer sequence TTCN PAM
ccccgaagcuggaggcgccc

SEQ ID NO: 38711 - RNA, 20 nt, Artificial Sequence
  spacer sequence TTCN PAM
gggagaaguucucccgaguc

SEQ ID NO: 38712 - RNA, 20 nt, Artificial Sequence
  spacer sequence TTCN PAM
ccacagucgggcgccuccag

SEQ ID NO: 38713 - RNA, 20 nt, Artificial Sequence
  spacer sequence TTCN PAM
ccacgugcagggccaguuuc

SEQ ID NO: 38714 - RNA, 20 nt, Artificial Sequence
  spacer sequence TTCN PAM
caccauugugcagccaggac

SEQ ID NO: 38715 - RNA, 20 nt, Artificial Sequence
  spacer sequence TTCN PAM
ugcccucaggcucccggcuc

SEQ ID NO: 38716 - RNA, 20 nt, Artificial Sequence
  spacer sequence TTCN PAM
caaugauggcuucuugcccu

SEQ ID NO: 38717 - RNA, 20 nt, Artificial Sequence
  spacer sequence TTCN PAM
agggaugggcagagcacugc

SEQ ID NO: 38718 - RNA, 20 nt, Artificial Sequence
  spacer sequence TTCN PAM
ccucccggccgcaugguguc

SEQ ID NO: 38719 - RNA, 20 nt, Artificial Sequence
  spacer sequence TTCN PAM
ccauggaccugcgcagcgau

SEQ ID NO: 38720 - RNA, 20 nt, Artificial Sequence
  spacer sequence TTCN PAM
gcaggaccaggcgcaggcca

SEQ ID NO: 38721 - RNA, 20 nt, Artificial Sequence
  spacer sequence TTCN PAM
cccacucacagacguaggcc

SEQ ID NO: 38722 - RNA, 20 nt, Artificial Sequence
  spacer sequence TTCN PAM
cugucacucagccccgccuc

SEQ ID NO: 38723 - RNA, 20 nt, Artificial Sequence
  spacer sequence TTCN PAM
cugucacucagccccgccuc

SEQ ID NO: 38724 - RNA, 20 nt, Artificial Sequence
  spacer sequence TTCN PAM
gccgcaaacccugagccccg

SEQ ID NO: 38725 - RNA, 20 nt, Artificial Sequence
  spacer sequence TTCN PAM
cuagcgccucgggucuggcg

SEQ ID NO: 38726 - RNA, 20 nt, Artificial Sequence
  spacer sequence TTCN PAM
gggagggcggugcggcucag

SEQ ID NO: 38727 - RNA, 20 nt, Artificial Sequence
  spacer sequence TTCN PAM
aguaauucccagcagccacc

SEQ ID NO: 38728 - RNA, 20 nt, Artificial Sequence
  spacer sequence TTCN PAM
cagcagccaccguagcuaua

SEQ ID NO: 38729 - RNA, 20 nt, Artificial Sequence
  spacer sequence TTCN PAM
accaaauauagcuacggugg

SEQ ID NO: 38730 - RNA, 20 nt, Artificial Sequence
  spacer sequence TTCN PAM
aggggcuuuaaauagcuggu

SEQ ID NO: 38731 - RNA, 20 nt, Artificial Sequence
  spacer sequence TTCN PAM
accaccagcuauuuaaagcc

SEQ ID NO: 38732 - RNA, 20 nt, Artificial Sequence
  spacer sequence TTCN PAM
ugcucgcuucggcagcacau

SEQ ID NO: 38733 - RNA, 20 nt, Artificial Sequence
  spacer sequence TTCN PAM
gcagcacauauacuaaaauu

SEQ ID NO: 38734 - RNA, 20 nt, Artificial Sequence
  spacer sequence TTCN PAM
aauuuuaguauaugugcugc

SEQ ID NO: 38735 - RNA, 20 nt, Artificial Sequence
  spacer sequence TTCN PAM
cuguaucguuccaauuuuag

SEQ ID NO: 38736 - RNA, 20 nt, Artificial Sequence
  spacer sequence TTCN PAM
ugaagcguuccauauuuuuu

SEQ ID NO: 38737 - RNA, 20 nt, Artificial Sequence
  spacer sequence TTCN PAM
cgaauuugcgugucauccuu

SEQ ID NO: 38738 - RNA, 20 nt, Artificial Sequence
  spacer sequence TTCN PAM
auauuuuuuuuuuuuuuucc

SEQ ID NO: 38739 - RNA, 20 nt, Artificial Sequence
  spacer sequence TTCN PAM
auuuucccucccagaaacgg

SEQ ID NO: 38740 - RNA, 20 nt, Artificial Sequence
  spacer sequence TTCN PAM
cucccagaaacggaaucuug

SEQ ID NO: 38741 - RNA, 20 nt, Artificial Sequence
  spacer sequence TTCN PAM
gggagggaaaauggaaaaaa

SEQ ID NO: 38742 - RNA, 20 nt, Artificial Sequence
  spacer sequence TTCN PAM
guuucugggagggaaaaugg

SEQ ID NO: 38743 - RNA, 20 nt, Artificial Sequence
  spacer sequence TTCN PAM
gggcagggccgggggcuuag

SEQ ID NO: 38744 - RNA, 20 nt, Artificial Sequence
  spacer sequence TTCN PAM
ucggggcagggccgggggcu

SEQ ID NO: 38745 - RNA, 20 nt, Artificial Sequence
  spacer sequence TTCN PAM
ggugcucuggccucgggcua

SEQ ID NO: 38746 - RNA, 20 nt, Artificial Sequence
  spacer sequence TTCN PAM
ccacuuucccccaaaacaca

SEQ ID NO: 38747 - RNA, 20 nt, Artificial Sequence
  spacer sequence TTCN PAM
cccaaaacacaauuacccac

SEQ ID NO: 38748 - RNA, 20 nt, Artificial Sequence
  spacer sequence TTCN PAM
ggcuggaaguccuggacccc

SEQ ID NO: 38749 - RNA, 20 nt, Artificial Sequence
  spacer sequence TTCN PAM
agccagaagccucugcccuu

SEQ ID NO: 38750 - RNA, 20 nt, Artificial Sequence
  spacer sequence TTCN PAM
uccccuccuuuaugcugggg

SEQ ID NO: 38751 - RNA, 20 nt, Artificial Sequence
  spacer sequence TTCN PAM
gcguguccucccccacgcca

SEQ ID NO: 38752 - RNA, 20 nt, Artificial Sequence
  spacer sequence TTCN PAM
guccugggucucagggcaca

SEQ ID NO: 38753 - RNA, 20 nt, Artificial Sequence
  spacer sequence TTCN PAM
ggcaugaggggcaggguccc

SEQ ID NO: 38754 - RNA, 20 nt, Artificial Sequence
  spacer sequence TTCN PAM
cuccaaaagggaaauuuaaa

SEQ ID NO: 38755 - RNA, 20 nt, Artificial Sequence
  spacer sequence TTCN PAM
cuuuuggagagaaaaaccaa

SEQ ID NO: 38756 - RNA, 20 nt, Artificial Sequence
  spacer sequence TTCN PAM
uuaaaagugauaaaaaccca

SEQ ID NO: 38757 - RNA, 20 nt, Artificial Sequence
  spacer sequence TTCN PAM
gaccgggccagaaaagcuca

SEQ ID NO: 38758 - RNA, 20 nt, Artificial Sequence
  spacer sequence TTCN PAM
cuugggguggucucucucac

SEQ ID NO: 38759 - RNA, 20 nt, Artificial Sequence
  spacer sequence TTCN PAM
gaggacaaauucuaaaaaua

SEQ ID NO: 38760 - RNA, 20 nt, Artificial Sequence
  spacer sequence TTCN PAM
aaaaauaugaaagauauuuu

SEQ ID NO: 38761 - RNA, 20 nt, Artificial Sequence
  spacer sequence TTCN PAM
uauuuuuagaauuuguccuc

SEQ ID NO: 38762 - RNA, 20 nt, Artificial Sequence
  spacer sequence TTCN PAM
gcuaaaauaucuuucauauu

SEQ ID NO: 38763 - RNA, 20 nt, Artificial Sequence
  spacer sequence TTCN PAM
ugccgccggggcugcuccug

SEQ ID NO: 38764 - RNA, 20 nt, Artificial Sequence
  spacer sequence TTCN PAM
ucugccgcuuccccuccagg

SEQ ID NO: 38765 - RNA, 20 nt, Artificial Sequence
  spacer sequence TTCN PAM
ccuccaggucagcaccugca

SEQ ID NO: 38766 - RNA, 20 nt, Artificial Sequence
  spacer sequence TTCN PAM
ugccccgcuggucccgucug

SEQ ID NO: 38767 - RNA, 20 nt, Artificial Sequence
  spacer sequence TTCN PAM
ucccguucuugccccgcugg

SEQ ID NO: 38768 - RNA, 20 nt, Artificial Sequence
  spacer sequence TTCN PAM
uuuuuuuuuuuuuuuuugag

SEQ ID NO: 38769 - RNA, 20 nt, Artificial Sequence
  spacer sequence TTCN PAM
ccugccucagccucccgagu

SEQ ID NO: 38770 - RNA, 20 nt, Artificial Sequence
  spacer sequence TTCN PAM
agcgauucuccugccucagc

SEQ ID NO: 38771 - RNA, 20 nt, Artificial Sequence
  spacer sequence TTCN PAM
cucugugggagacgcagccc

SEQ ID NO: 38772 - RNA, 20 nt, Artificial Sequence
  spacer sequence TTCN PAM
auggcaaccggacgaugccu

SEQ ID NO: 38773 - RNA, 20 nt, Artificial Sequence
  spacer sequence TTCN PAM
gcugcacgcugucugccagu

SEQ ID NO: 38774 - RNA, 20 nt, Artificial Sequence
  spacer sequence TTCN PAM
agaggcuucugcugcacgcu

SEQ ID NO: 38775 - RNA, 20 nt, Artificial Sequence
  spacer sequence TTCN PAM
ccacagcuucgagaggcuuc

SEQ ID NO: 38776 - RNA, 20 nt, Artificial Sequence
  spacer sequence TTCN PAM
ccguguccccccaggccgug

SEQ ID NO: 38777 - RNA, 20 nt, Artificial Sequence
  spacer sequence TTCN PAM
ucuccguguccccccaggcc

SEQ ID NO: 38778 - RNA, 20 nt, Artificial Sequence
  spacer sequence TTCN PAM
guucuucuccgugucccccc

SEQ ID NO: 38779 - RNA, 20 nt, Artificial Sequence
  spacer sequence TTCN PAM
uggggagagcggcccggugg

SEQ ID NO: 38780 - RNA, 20 nt, Artificial Sequence
  spacer sequence TTCN PAM
cugaccaccgggccgcucuc

SEQ ID NO: 38781 - RNA, 20 nt, Artificial Sequence
  spacer sequence TTCN PAM
accugccuggucuuuuuuga

SEQ ID NO: 38782 - RNA, 20 nt, Artificial Sequence
  spacer sequence TTCN PAM
agcgcaucagccggcgucug

SEQ ID NO: 38783 - RNA, 20 nt, Artificial Sequence
  spacer sequence TTCN PAM
cccacuccugcagaggaccc

SEQ ID NO: 38784 - RNA, 20 nt, Artificial Sequence
  spacer sequence TTCN PAM
cuaccuggaggaugagggca

SEQ ID NO: 38785 - RNA, 20 nt, Artificial Sequence
  spacer sequence TTCN PAM
ucgcuaccuggaggaugagg

SEQ ID NO: 38786 - RNA, 20 nt, Artificial Sequence
  spacer sequence TTCN PAM
ugaaaucguuccagaccugg

SEQ ID NO: 38787 - RNA, 20 nt, Artificial Sequence
  spacer sequence TTCN PAM
ugaaccgcuccggggaggag

SEQ ID NO: 38788 - RNA, 20 nt, Artificial Sequence
  spacer sequence TTCN PAM
agaccuggaagagaggcagg

SEQ ID NO: 38789 - RNA, 20 nt, Artificial Sequence
  spacer sequence TTCN PAM
aggucuggaacgauuucaug

SEQ ID NO: 38790 - RNA, 20 nt, Artificial Sequence
  spacer sequence TTCN PAM
uggcaagccugccucccugc

SEQ ID NO: 38791 - RNA, 20 nt, Artificial Sequence
  spacer sequence TTCN PAM
accuagcccaguaccuccug

SEQ ID NO: 38792 - RNA, 20 nt, Artificial Sequence
  spacer sequence TTCN PAM
ccaggcgcuggaggcucuuc

SEQ ID NO: 38793 - RNA, 20 nt, Artificial Sequence
  spacer sequence TTCN PAM
gccccuuggccuugggcacg

SEQ ID NO: 38794 - RNA, 20 nt, Artificial Sequence
  spacer sequence TTCN PAM
gcacugccugguugaugaag

SEQ ID NO: 38795 - RNA, 20 nt, Artificial Sequence
  spacer sequence TTCN PAM
ucaaccaggcagugcggaac

SEQ ID NO: 38796 - RNA, 20 nt, Artificial Sequence
  spacer sequence TTCN PAM
gccuggaagccgagagucuc

SEQ ID NO: 38797 - RNA, 20 nt, Artificial Sequence
  spacer sequence TTCN PAM
aggcggaaacagcacuucau

SEQ ID NO: 38798 - RNA, 20 nt, Artificial Sequence
  spacer sequence TTCN PAM
ccugggagcuggcuagggca

SEQ ID NO: 38799 - RNA, 20 nt, Artificial Sequence
  spacer sequence TTCN PAM
cagcugccugccugcccuag

SEQ ID NO: 38800 - RNA, 20 nt, Artificial Sequence
  spacer sequence TTCN PAM
uccuaugauggggaacucac

SEQ ID NO: 38801 - RNA, 20 nt, Artificial Sequence
  spacer sequence TTCN PAM
ccaucauaggaggaaaacaa

SEQ ID NO: 38802 - RNA, 20 nt, Artificial Sequence
  spacer sequence TTCN PAM
auuacuuugaugcccauuau

SEQ ID NO: 38803 - RNA, 20 nt, Artificial Sequence
  spacer sequence TTCN PAM
ccaccccagcagcuggacag

SEQ ID NO: 38804 - RNA, 20 nt, Artificial Sequence
  spacer sequence TTCN PAM
guuaucggcccuguccagcu

SEQ ID NO: 38805 - RNA, 20 nt, Artificial Sequence
  spacer sequence TTCN PAM
ccgagggcuccccucggaug

SEQ ID NO: 38806 - RNA, 20 nt, Artificial Sequence
  spacer sequence TTCN PAM
ugggggagggaccagugcug

SEQ ID NO: 38807 - RNA, 20 nt, Artificial Sequence
  spacer sequence TTCN PAM
ucucuugcugucucuagugg

SEQ ID NO: 38808 - RNA, 20 nt, Artificial Sequence
  spacer sequence TTCN PAM
ugaugcacaagucgguuccu

SEQ ID NO: 38809 - RNA, 20 nt, Artificial Sequence
  spacer sequence TTCN PAM
ccgcucugccggcugcacau

SEQ ID NO: 38810 - RNA, 20 nt, Artificial Sequence
  spacer sequence TTCN PAM
auggccagauuagucagcgu

SEQ ID NO: 38811 - RNA, 20 nt, Artificial Sequence
  spacer sequence TTCN PAM
ggccaggcucaggaagugag

SEQ ID NO: 38812 - RNA, 20 nt, Artificial Sequence
  spacer sequence TTCN PAM
ugagccuggccagaaccagg

SEQ ID NO: 38813 - RNA, 20 nt, Artificial Sequence
  spacer sequence TTCN PAM
ggacauggggccuggguccc

SEQ ID NO: 38814 - RNA, 20 nt, Artificial Sequence
  spacer sequence TTCN PAM
augcccagcagccuccucug

SEQ ID NO: 38815 - RNA, 20 nt, Artificial Sequence
  spacer sequence TTCN PAM
ccgucucugaggguggcaga

SEQ ID NO: 38816 - RNA, 20 nt, Artificial Sequence
  spacer sequence TTCN PAM
uacuugcucucacguucucc

SEQ ID NO: 38817 - RNA, 20 nt, Artificial Sequence
  spacer sequence TTCN PAM
gggaggagccccgucuggau

SEQ ID NO: 38818 - RNA, 20 nt, Artificial Sequence
  spacer sequence TTCN PAM
ggguggacgugaguuuuggg

SEQ ID NO: 38819 - RNA, 20 nt, Artificial Sequence
  spacer sequence TTCN PAM
aaaugcagucccaucuugag

SEQ ID NO: 38820 - RNA, 20 nt, Artificial Sequence
  spacer sequence TTCN PAM
gagacccuauuuccaaaugc

SEQ ID NO: 38821 - RNA, 20 nt, Artificial Sequence
  spacer sequence TTCN PAM
gugagguccugcagcguacg

SEQ ID NO: 38822 - RNA, 20 nt, Artificial Sequence
  spacer sequence TTCN PAM
aaagcgcggggaucacaggu

SEQ ID NO: 38823 - RNA, 20 nt, Artificial Sequence
  spacer sequence TTCN PAM
cuugagcccaggagcuugag

SEQ ID NO: 38824 - RNA, 20 nt, Artificial Sequence
  spacer sequence TTCN PAM
ugggcucaagcaauccuccu

SEQ ID NO: 38825 - RNA, 20 nt, Artificial Sequence
  spacer sequence TTCN PAM
uuuuuugacacaggguccug

SEQ ID NO: 38826 - RNA, 20 nt, Artificial Sequence
  spacer sequence TTCN PAM
gaccacaggugauccgcccu

SEQ ID NO: 38827 - RNA, 20 nt, Artificial Sequence
  spacer sequence TTCN PAM
ccauguuggucaggcugguc

SEQ ID NO: 38828 - RNA, 20 nt, Artificial Sequence
  spacer sequence TTCN PAM
caaguagcugggauuacagg

SEQ ID NO: 38829 - RNA, 20 nt, Artificial Sequence
  spacer sequence TTCN PAM
ccugccucagcuucccaagu

SEQ ID NO: 38830 - RNA, 20 nt, Artificial Sequence
  spacer sequence TTCN PAM
aacaauucuccugccucagc

SEQ ID NO: 38831 - RNA, 20 nt, Artificial Sequence
  spacer sequence TTCN PAM
uuuuuuuuuugagacagagu

SEQ ID NO: 38832 - RNA, 20 nt, Artificial Sequence
  spacer sequence TTCN PAM
uuucuuuuuuuuuuugagac

SEQ ID NO: 38833 - RNA, 20 nt, Artificial Sequence
  spacer sequence TTCN PAM
cuuuuuucuuuucuuuuuuu

SEQ ID NO: 38834 - RNA, 20 nt, Artificial Sequence
  spacer sequence TTCN PAM
gggggcuccagguguccuug

SEQ ID NO: 38835 - RNA, 20 nt, Artificial Sequence
  spacer sequence TTCN PAM
cuccucucccagcuucuggg

SEQ ID NO: 38836 - RNA, 20 nt, Artificial Sequence
  spacer sequence TTCN PAM
cuccacaagucugacaucag

SEQ ID NO: 38837 - RNA, 20 nt, Artificial Sequence
  spacer sequence TTCN PAM
ucucuccacaagucugacau

SEQ ID NO: 38838 - RNA, 20 nt, Artificial Sequence
  spacer sequence TTCN PAM
gcccuaaccuugcccagggc

SEQ ID NO: 38839 - RNA, 20 nt, Artificial Sequence
  spacer sequence TTCN PAM
ugggcacuuacggagcaccu

SEQ ID NO: 38840 - RNA, 20 nt, Artificial Sequence
  spacer sequence TTCN PAM
ugcacggcuguguccccagu

SEQ ID NO: 38841 - RNA, 20 nt, Artificial Sequence
  spacer sequence TTCN PAM
gcuucaugcacggcuguguc

SEQ ID NO: 38842 - RNA, 20 nt, Artificial Sequence
  spacer sequence TTCN PAM
gucgaugcccccaaaccuug

SEQ ID NO: 38843 - RNA, 20 nt, Artificial Sequence
  spacer sequence TTCN PAM
gggcaagugagcguccccca

SEQ ID NO: 38844 - RNA, 20 nt, Artificial Sequence
  spacer sequence TTCN PAM
gccaggcuggcagucgggcc

SEQ ID NO: 38845 - RNA, 20 nt, Artificial Sequence
  spacer sequence TTCN PAM
uugucugguuuucgggggug

SEQ ID NO: 38846 - RNA, 20 nt, Artificial Sequence
  spacer sequence TTCN PAM
gggguggauuuugagacagg

SEQ ID NO: 38847 - RNA, 20 nt, Artificial Sequence
  spacer sequence TTCN PAM
cgugucagccuccugaguag

SEQ ID NO: 38848 - RNA, 20 nt, Artificial Sequence
  spacer sequence TTCN PAM
uuuuauuuuuuggagacagg

SEQ ID NO: 38849 - RNA, 20 nt, Artificial Sequence
  spacer sequence TTCN PAM
gccugggcaacgcagcaaga

SEQ ID NO: 38850 - RNA, 20 nt, Artificial Sequence
  spacer sequence TTCN PAM
uucuccucuccccucucccu

SEQ ID NO: 38851 - RNA, 20 nt, Artificial Sequence
  spacer sequence TTCN PAM
ccucuccccucucccugucu

SEQ ID NO: 38852 - RNA, 20 nt, Artificial Sequence
  spacer sequence TTCN PAM
accacgucgcccuguaauuc

SEQ ID NO: 38853 - RNA, 20 nt, Artificial Sequence
  spacer sequence TTCN PAM
ucccugacggccauuuuucc

SEQ ID NO: 38854 - RNA, 20 nt, Artificial Sequence
  spacer sequence TTCN PAM
cugacggccauuuuuccggg

SEQ ID NO: 38855 - RNA, 20 nt, Artificial Sequence
  spacer sequence TTCN PAM
gggaguggcugggcgucucu

SEQ ID NO: 38856 - RNA, 20 nt, Artificial Sequence
  spacer sequence TTCN PAM
uggggaagaacuagacagau

SEQ ID NO: 38857 - RNA, 20 nt, Artificial Sequence
  spacer sequence TTCN PAM
ccaagaaccagguccaaggg

SEQ ID NO: 38858 - RNA, 20 nt, Artificial Sequence
  spacer sequence TTCN PAM
uccccaagaaccagguccaa

SEQ ID NO: 38859 - RNA, 20 nt, Artificial Sequence
  spacer sequence TTCN PAM
uugcuuuaaugccaccuggg

SEQ ID NO: 38860 - RNA, 20 nt, Artificial Sequence
  spacer sequence TTCN PAM
ccgcccguaagacggggaug

SEQ ID NO: 38861 - RNA, 20 nt, Artificial Sequence
  spacer sequence TTCN PAM
gauaccauccccgucuuacg

SEQ ID NO: 38862 - RNA, 20 nt, Artificial Sequence
  spacer sequence TTCN PAM
uccuuggccuuuacgguuca

SEQ ID NO: 38863 - RNA, 20 nt, Artificial Sequence
  spacer sequence TTCN PAM
ccagguuucuccuguaacuc

SEQ ID NO: 38864 - RNA, 20 nt, Artificial Sequence
  spacer sequence TTCN PAM
ccuguaacuccuguagagag

SEQ ID NO: 38865 - RNA, 20 nt, Artificial Sequence
  spacer sequence TTCN PAM
uguccugcccucagccuggg

SEQ ID NO: 38866 - RNA, 20 nt, Artificial Sequence
  spacer sequence TTCN PAM
gccagaccccaggcugaggg

SEQ ID NO: 38867 - RNA, 20 nt, Artificial Sequence
  spacer sequence TTCN PAM
ucuugacucuagggugggag

SEQ ID NO: 38868 - RNA, 20 nt, Artificial Sequence
  spacer sequence TTCN PAM
accucccacccuagagucaa

SEQ ID NO: 38869 - RNA, 20 nt, Artificial Sequence
  spacer sequence TTCN PAM
uuccugcagccgucuuuggg

SEQ ID NO: 38870 - RNA, 20 nt, Artificial Sequence
  spacer sequence TTCN PAM
ugcagccgucuuugggcccg

SEQ ID NO: 38871 - RNA, 20 nt, Artificial Sequence
  spacer sequence TTCN PAM
ggccccuugcacugcccggc

SEQ ID NO: 38872 - RNA, 20 nt, Artificial Sequence
  spacer sequence TTCN PAM
guucagagaaccugggcugg

SEQ ID NO: 38873 - RNA, 20 nt, Artificial Sequence
  spacer sequence TTCN PAM
gagaaccugggcugggagug

SEQ ID NO: 38874 - RNA, 20 nt, Artificial Sequence
  spacer sequence TTCN PAM
cugaacagaaacgcagccca

SEQ ID NO: 38875 - RNA, 20 nt, Artificial Sequence
  spacer sequence TTCN PAM
aaauggacacuccugcuggg

SEQ ID NO: 38876 - RNA, 20 nt, Artificial Sequence
  spacer sequence TTCN PAM
gaggcuuucugggaccgucc

SEQ ID NO: 38877 - RNA, 20 nt, Artificial Sequence
  spacer sequence TTCN PAM
gggaccguccaggucccguc

SEQ ID NO: 38878 - RNA, 20 nt, Artificial Sequence
  spacer sequence TTCN PAM
cugcagacgggaccuggacg

SEQ ID NO: 38879 - RNA, 20 nt, Artificial Sequence
  spacer sequence TTCN PAM
cagcagggaaaaaugaggcu

SEQ ID NO: 38880 - RNA, 20 nt, Artificial Sequence
  spacer sequence TTCN PAM
cugcugagaaaugggcucgg

SEQ ID NO: 38881 - RNA, 20 nt, Artificial Sequence
  spacer sequence TTCN PAM
guacaggguccccgcccccc

SEQ ID NO: 38882 - RNA, 20 nt, Artificial Sequence
  spacer sequence TTCN PAM
ucacugccugggggaggaga

SEQ ID NO: 38883 - RNA, 20 nt, Artificial Sequence
  spacer sequence TTCN PAM
ccucccccaggcagugacga

SEQ ID NO: 38884 - RNA, 20 nt, Artificial Sequence
  spacer sequence TTCN PAM
uuuuuauuuuuuuguuuuuu

SEQ ID NO: 38885 - RNA, 20 nt, Artificial Sequence
  spacer sequence TTCN PAM
uuuuuauuuauuuauuuaug

SEQ ID NO: 38886 - RNA, 20 nt, Artificial Sequence
  spacer sequence TTCN PAM
agcgauucuccugccuuagc

SEQ ID NO: 38887 - RNA, 20 nt, Artificial Sequence
  spacer sequence TTCN PAM
ccugccuuagccucccgagu

SEQ ID NO: 38888 - RNA, 20 nt, Artificial Sequence
  spacer sequence TTCN PAM
aaaaauuagccgggcguggu

SEQ ID NO: 38889 - RNA, 20 nt, Artificial Sequence
  spacer sequence TTCN PAM
cgccauuuuccugccucagc

SEQ ID NO: 38890 - RNA, 20 nt, Artificial Sequence
  spacer sequence TTCN PAM
ugccucagccucccgaguag

SEQ ID NO: 38891 - RNA, 20 nt, Artificial Sequence
  spacer sequence TTCN PAM
ccauguuggccaggcugguc

SEQ ID NO: 38892 - RNA, 20 nt, Artificial Sequence
  spacer sequence TTCN PAM
uucuuuaaucccaaaggcuu

SEQ ID NO: 38893 - RNA, 20 nt, Artificial Sequence
  spacer sequence TTCN PAM
uuaaucccaaaggcuucaaa

SEQ ID NO: 38894 - RNA, 20 nt, Artificial Sequence
  spacer sequence TTCN PAM
aaacuaaaauucuguuuguu

SEQ ID NO: 38895 - RNA, 20 nt, Artificial Sequence
  spacer sequence TTCN PAM
guuuguuuguuugugugugu

SEQ ID NO: 38896 - RNA, 20 nt, Artificial Sequence
  spacer sequence TTCN PAM
gcauugaaauguuugcuggg

SEQ ID NO: 38897 - RNA, 20 nt, Artificial Sequence
  spacer sequence TTCN PAM
augcagaaucucaguguggg

SEQ ID NO: 38898 - RNA, 20 nt, Artificial Sequence
  spacer sequence TTCN PAM
cagaugcagacacagacaca

SEQ ID NO: 38899 - RNA, 20 nt, Artificial Sequence
  spacer sequence TTCN PAM
uggcagauagaggggcugcu

SEQ ID NO: 38900 - RNA, 20 nt, Artificial Sequence
  spacer sequence TTCN PAM
acgucauaucucgccgccau

SEQ ID NO: 38901 - RNA, 20 nt, Artificial Sequence
  spacer sequence TTCN PAM
ggaagugccugucagcugau

SEQ ID NO: 38902 - RNA, 20 nt, Artificial Sequence
  spacer sequence TTCN PAM
agaaaguuggugcagaggag

SEQ ID NO: 38903 - RNA, 20 nt, Artificial Sequence
  spacer sequence TTCN PAM
ccaacugugaaacgggcugg

SEQ ID NO: 38904 - RNA, 20 nt, Artificial Sequence
  spacer sequence TTCN PAM
caguuggggaaacugaggcc

SEQ ID NO: 38905 - RNA, 20 nt, Artificial Sequence
  spacer sequence TTCN PAM
cagaugagaagaccgaggug

SEQ ID NO: 38906 - RNA, 20 nt, Artificial Sequence
  spacer sequence TTCN PAM
caucugugaaacggucccgg

SEQ ID NO: 38907 - RNA, 20 nt, Artificial Sequence
  spacer sequence TTCN PAM
ugcgaucgccacccuggcac

SEQ ID NO: 38908 - RNA, 20 nt, Artificial Sequence
  spacer sequence TTCN PAM
cccgugacgggcccuucgug

SEQ ID NO: 38909 - RNA, 20 nt, Artificial Sequence
  spacer sequence TTCN PAM
gggggagcuugcugacgcca

SEQ ID NO: 38910 - RNA, 20 nt, Artificial Sequence
  spacer sequence TTCN PAM
agaucacgagauuccggggg

SEQ ID NO: 38911 - RNA, 20 nt, Artificial Sequence
  spacer sequence TTCN PAM
cuguggauuuccagaucacg

SEQ ID NO: 38912 - RNA, 20 nt, Artificial Sequence
  spacer sequence TTCN PAM
ccacgccagcuucccgggcc

SEQ ID NO: 38913 - RNA, 20 nt, Artificial Sequence
  spacer sequence TTCN PAM
cgggccgcgcuucauuguca

SEQ ID NO: 38914 - RNA, 20 nt, Artificial Sequence
  spacer sequence TTCN PAM
uugucauuucuggagagugu

SEQ ID NO: 38915 - RNA, 20 nt, Artificial Sequence
  spacer sequence TTCN PAM
ggagaguguuauuaauaucc

SEQ ID NO: 38916 - RNA, 20 nt, Artificial Sequence
  spacer sequence TTCN PAM
agagaggggacucggggccc

SEQ ID NO: 38917 - RNA, 20 nt, Artificial Sequence
  spacer sequence TTCN PAM
gcccugcccagaaucacuuc

SEQ ID NO: 38918 - RNA, 20 nt, Artificial Sequence
  spacer sequence TTCN PAM
gggcagggccgaacaucugc

SEQ ID NO: 38919 - RNA, 20 nt, Artificial Sequence
  spacer sequence TTCN PAM
ccaauuuccccacgcccggc

SEQ ID NO: 38920 - RNA, 20 nt, Artificial Sequence
  spacer sequence TTCN PAM
ccacgcccggcggggcucuc

SEQ ID NO: 38921 - RNA, 20 nt, Artificial Sequence
  spacer sequence TTCN PAM
cgucagcacagccaggccuc

SEQ ID NO: 38922 - RNA, 20 nt, Artificial Sequence
  spacer sequence TTCN PAM
auucccgucagcacagccag

SEQ ID NO: 38923 - RNA, 20 nt, Artificial Sequence
  spacer sequence TTCN PAM
ccgcccucucugggcucugc

SEQ ID NO: 38924 - RNA, 20 nt, Artificial Sequence
  spacer sequence TTCN PAM
cuucacagcccacccgcccc

SEQ ID NO: 38925 - RNA, 20 nt, Artificial Sequence
  spacer sequence TTCN PAM
cagcccacccgccccagcug

SEQ ID NO: 38926 - RNA, 20 nt, Artificial Sequence
  spacer sequence TTCN PAM
uccugcucccugaaccggga

SEQ ID NO: 38927 - RNA, 20 nt, Artificial Sequence
  spacer sequence TTCN PAM
gggagcaggaggaagagguc

SEQ ID NO: 38928 - RNA, 20 nt, Artificial Sequence
  spacer sequence TTCN PAM
cgguucagggagcaggagga

SEQ ID NO: 38929 - RNA, 20 nt, Artificial Sequence
  spacer sequence TTCN PAM
gccaggacagggcacucugc

SEQ ID NO: 38930 - RNA, 20 nt, Artificial Sequence
  spacer sequence TTCN PAM
gggacgggaaaaacagcgag

SEQ ID NO: 38931 - RNA, 20 nt, Artificial Sequence
  spacer sequence TTCN PAM
cgucccggaaacucccagga

SEQ ID NO: 38932 - RNA, 20 nt, Artificial Sequence
  spacer sequence TTCN PAM
aaaucccccggccucccggg

SEQ ID NO: 38933 - RNA, 20 nt, Artificial Sequence
  spacer sequence TTCN PAM
gcuucuugauggcuucggcc

SEQ ID NO: 38934 - RNA, 20 nt, Artificial Sequence
  spacer sequence TTCN PAM
ugauggcuucggccccaccc

SEQ ID NO: 38935 - RNA, 20 nt, Artificial Sequence
  spacer sequence TTCN PAM
gccccacccccaccaugggu

SEQ ID NO: 38936 - RNA, 20 nt, Artificial Sequence
  spacer sequence TTCN PAM
ccgggccucaguuuacccau

SEQ ID NO: 38937 - RNA, 20 nt, Artificial Sequence
  spacer sequence TTCN PAM
uuccuucuucauuccugccu

SEQ ID NO: 38938 - RNA, 20 nt, Artificial Sequence
  spacer sequence TTCN PAM
uucuucauuccugccucauc

SEQ ID NO: 38939 - RNA, 20 nt, Artificial Sequence
  spacer sequence TTCN PAM
ucauuccugccucaucuguc

SEQ ID NO: 38940 - RNA, 20 nt, Artificial Sequence
  spacer sequence TTCN PAM
uuccugccucaucuguccag

SEQ ID NO: 38941 - RNA, 20 nt, Artificial Sequence
  spacer sequence TTCN PAM
ugccucaucuguccagcugu

SEQ ID NO: 38942 - RNA, 20 nt, Artificial Sequence
  spacer sequence TTCN PAM
uuccuggccucuggacucug

SEQ ID NO: 38943 - RNA, 20 nt, Artificial Sequence
  spacer sequence TTCN PAM
uggccucuggacucuguggg

SEQ ID NO: 38944 - RNA, 20 nt, Artificial Sequence
  spacer sequence TTCN PAM
cucugucgcccaggcuggag

SEQ ID NO: 38945 - RNA, 20 nt, Artificial Sequence
  spacer sequence TTCN PAM
agugauucuccugccucagc

SEQ ID NO: 38946 - RNA, 20 nt, Artificial Sequence
  spacer sequence TTCN PAM
ccugccucagccucccgagu

SEQ ID NO: 38947 - RNA, 20 nt, Artificial Sequence
  spacer sequence TTCN PAM
cgccucuccggacuguggac

SEQ ID NO: 38948 - RNA, 20 nt, Artificial Sequence
  spacer sequence TTCN PAM
cuuguccacaguccggagag

SEQ ID NO: 38949 - RNA, 20 nt, Artificial Sequence
  spacer sequence TTCN PAM
ccaaaugcagagcagggccc

SEQ ID NO: 38950 - RNA, 20 nt, Artificial Sequence
  spacer sequence TTCN PAM
gagaggggccggaaagggga

SEQ ID NO: 38951 - RNA, 20 nt, Artificial Sequence
  spacer sequence TTCN PAM
ggccccucucugaagcccca

SEQ ID NO: 38952 - RNA, 20 nt, Artificial Sequence
  spacer sequence TTCN PAM
uccaaugcugguguccccuu

SEQ ID NO: 38953 - RNA, 20 nt, Artificial Sequence
  spacer sequence TTCN PAM
uuccuccaaugcuggugucc

SEQ ID NO: 38954 - RNA, 20 nt, Artificial Sequence
  spacer sequence TTCN PAM
uacggccucuuucuuuuccu

SEQ ID NO: 38955 - RNA, 20 nt, Artificial Sequence
  spacer sequence TTCN PAM
uuuccuucuuccuccaacuc

SEQ ID NO: 38956 - RNA, 20 nt, Artificial Sequence
  spacer sequence TTCN PAM
uucuuccuccaacuccuggc

SEQ ID NO: 38957 - RNA, 20 nt, Artificial Sequence
  spacer sequence TTCN PAM
uccuccaacuccuggccuca

SEQ ID NO: 38958 - RNA, 20 nt, Artificial Sequence
  spacer sequence TTCN PAM
uccaacuccuggccucaagc

SEQ ID NO: 38959 - RNA, 20 nt, Artificial Sequence
  spacer sequence TTCN PAM
ccucccuccaguggaugccu

SEQ ID NO: 38960 - RNA, 20 nt, Artificial Sequence
  spacer sequence TTCN PAM
cgccacugugccccacagac

SEQ ID NO: 38961 - RNA, 20 nt, Artificial Sequence
  spacer sequence TTCN PAM
gucuuuuuuuuuuuuuuuuu

SEQ ID NO: 38962 - RNA, 20 nt, Artificial Sequence
  spacer sequence TTCN PAM
agugauucucccaccucagc

SEQ ID NO: 38963 - RNA, 20 nt, Artificial Sequence
  spacer sequence TTCN PAM
cccaccucagccuccugagu

SEQ ID NO: 38964 - RNA, 20 nt, Artificial Sequence
  spacer sequence TTCN PAM
agcuacucaggaggcugagg

SEQ ID NO: 38965 - RNA, 20 nt, Artificial Sequence
  spacer sequence TTCN PAM
ccaccacgcccggcuaauuu

SEQ ID NO: 38966 - RNA, 20 nt, Artificial Sequence
  spacer sequence TTCN PAM
ccauguuggccaggcuggga

SEQ ID NO: 38967 - RNA, 20 nt, Artificial Sequence
  spacer sequence TTCN PAM
ugccuaccucccacccauca

SEQ ID NO: 38968 - RNA, 20 nt, Artificial Sequence
  spacer sequence TTCN PAM
cucuggggacggccucuuug

SEQ ID NO: 38969 - RNA, 20 nt, Artificial Sequence
  spacer sequence TTCN PAM
cucuggggacggccucaucc

SEQ ID NO: 38970 - RNA, 20 nt, Artificial Sequence
  spacer sequence TTCN PAM
cucuggggacggccucaucc

SEQ ID NO: 38971 - RNA, 20 nt, Artificial Sequence
  spacer sequence TTCN PAM
cucuggggacggccucaucc

SEQ ID NO: 38972 - RNA, 20 nt, Artificial Sequence
  spacer sequence TTCN PAM
cucuggggacggccucaucc

SEQ ID NO: 38973 - RNA, 20 nt, Artificial Sequence
  spacer sequence TTCN PAM
cucuggggacggccucaucc

SEQ ID NO: 38974 - RNA, 20 nt, Artificial Sequence
  spacer sequence TTCN PAM
cucuggggacggccucaucc

SEQ ID NO: 38975 - RNA, 20 nt, Artificial Sequence
  spacer sequence TTCN PAM
cucuggggacggccucaucc

SEQ ID NO: 38976 - RNA, 20 nt, Artificial Sequence
  spacer sequence TTCN PAM
cucuggggacggccucaucc

SEQ ID NO: 38977 - RNA, 20 nt, Artificial Sequence
  spacer sequence TTCN PAM
cucuggggacggccucaucc

SEQ ID NO: 38978 - RNA, 20 nt, Artificial Sequence
  spacer sequence TTCN PAM
cucuggggacggccucaucc

SEQ ID NO: 38979 - RNA, 20 nt, Artificial Sequence
  spacer sequence TTCN PAM
cucuggggacggccucaucc

SEQ ID NO: 38980 - RNA, 20 nt, Artificial Sequence
  spacer sequence TTCN PAM
cucuggggacggccucaucc

SEQ ID NO: 38981 - RNA, 20 nt, Artificial Sequence
  spacer sequence TTCN PAM
cucuggggacggccucaucc

SEQ ID NO: 38982 - RNA, 20 nt, Artificial Sequence
  spacer sequence TTCN PAM
cgggcucaggcugggugcuc

SEQ ID NO: 38983 - RNA, 20 nt, Artificial Sequence
  spacer sequence TTCN PAM
cugagugggccccucucacu

SEQ ID NO: 38984 - RNA, 20 nt, Artificial Sequence
  spacer sequence TTCN PAM
gggggagcagccaggugugu

SEQ ID NO: 38985 - RNA, 20 nt, Artificial Sequence
  spacer sequence TTCN PAM
ucugggagcaguagggagcc

SEQ ID NO: 38986 - RNA, 20 nt, Artificial Sequence
  spacer sequence TTCN PAM
gggagcaguagggagccacg

SEQ ID NO: 38987 - RNA, 20 nt, Artificial Sequence
  spacer sequence TTCN PAM
aagccccuuggucccuccga

SEQ ID NO: 38988 - RNA, 20 nt, Artificial Sequence
  spacer sequence TTCN PAM
agcagccuccaaggucggag

SEQ ID NO: 38989 - RNA, 20 nt, Artificial Sequence
  spacer sequence TTCN PAM
uggggauuugggagauaaaa

SEQ ID NO: 38990 - RNA, 20 nt, Artificial Sequence
  spacer sequence TTCN PAM
guuuaacuuugguuguagga

SEQ ID NO: 38991 - RNA, 20 nt, Artificial Sequence
  spacer sequence TTCN PAM
cugugacuccuacaaccaaa

SEQ ID NO: 38992 - RNA, 20 nt, Artificial Sequence
  spacer sequence TTCN PAM
uuauuuuguuuuuuuuuuga

SEQ ID NO: 38993 - RNA, 20 nt, Artificial Sequence
  spacer sequence TTCN PAM
cucuuguuucccaggcugga

SEQ ID NO: 38994 - RNA, 20 nt, Artificial Sequence
  spacer sequence TTCN PAM
caggcuggagugcaauggca

SEQ ID NO: 38995 - RNA, 20 nt, Artificial Sequence
  spacer sequence TTCN PAM
aacuauucuccugccucagc

SEQ ID NO: 38996 - RNA, 20 nt, Artificial Sequence
  spacer sequence TTCN PAM
ccugccucagccucuugagu

SEQ ID NO: 38997 - RNA, 20 nt, Artificial Sequence
  spacer sequence TTCN PAM
ccauguuggucaggcugguc

SEQ ID NO: 38998 - RNA, 20 nt, Artificial Sequence
  spacer sequence TTCN PAM
uucuuaaagaagagacgggg

SEQ ID NO: 38999 - RNA, 20 nt, Artificial Sequence
  spacer sequence TTCN PAM
uaaagaagagacggggucuc

SEQ ID NO: 39000 - RNA, 20 nt, Artificial Sequence
  spacer sequence TTCN PAM
uuaagaaagaauccuggccg

SEQ ID NO: 39001 - RNA, 20 nt, Artificial Sequence
  spacer sequence TTCN PAM
gccuuggccucccaacgugc

SEQ ID NO: 39002 - RNA, 20 nt, Artificial Sequence
  spacer sequence TTCN PAM
agaccagccuggccaacaug

SEQ ID NO: 39003 - RNA, 20 nt, Artificial Sequence
  spacer sequence TTCN PAM
caccauguuggccaggcugg

SEQ ID NO: 39004 - RNA, 20 nt, Artificial Sequence
  spacer sequence TTCN PAM
uuuuuuugagacagggucuu

SEQ ID NO: 39005 - RNA, 20 nt, Artificial Sequence
  spacer sequence TTCN PAM
uuagucuacguuguuuuuuu

SEQ ID NO: 39006 - RNA, 20 nt, Artificial Sequence
  spacer sequence TTCN PAM
ccggcuggucugggugggcc

SEQ ID NO: 39007 - RNA, 20 nt, Artificial Sequence
  spacer sequence TTCN PAM
uccaacagccaggcccaccc

SEQ ID NO: 39008 - RNA, 20 nt, Artificial Sequence
  spacer sequence TTCN PAM
cuuuuucccucugacccuuc

SEQ ID NO: 39009 - RNA, 20 nt, Artificial Sequence
  spacer sequence TTCN PAM
cucugacccuucagccccgc

SEQ ID NO: 39010 - RNA, 20 nt, Artificial Sequence
  spacer sequence TTCN PAM
gccccgcugggugcgugggc

SEQ ID NO: 39011 - RNA, 20 nt, Artificial Sequence
  spacer sequence TTCN PAM
gagcauccgcagaccuauau

SEQ ID NO: 39012 - RNA, 20 nt, Artificial Sequence
  spacer sequence TTCN PAM
ucuaaggccagauauagguc

SEQ ID NO: 39013 - RNA, 20 nt, Artificial Sequence
  spacer sequence TTCN PAM
ucaguuucccagaagccaua

SEQ ID NO: 39014 - RNA, 20 nt, Artificial Sequence
  spacer sequence TTCN PAM
guuucccagaagccauauug

SEQ ID NO: 39015 - RNA, 20 nt, Artificial Sequence
  spacer sequence TTCN PAM
cagaagccauauuggacagu

SEQ ID NO: 39016 - RNA, 20 nt, Artificial Sequence
  spacer sequence TTCN PAM
gggaaacugaagaaguaugu

SEQ ID NO: 39017 - RNA, 20 nt, Artificial Sequence
  spacer sequence TTCN PAM
aaaaggcacguuuuugcacu

SEQ ID NO: 39018 - RNA, 20 nt, Artificial Sequence
  spacer sequence TTCN PAM
caggcugggcacaguggcuc

SEQ ID NO: 39019 - RNA, 20 nt, Artificial Sequence
  spacer sequence TTCN PAM
ggguaugagccacugugccc

SEQ ID NO: 39020 - RNA, 20 nt, Artificial Sequence
  spacer sequence TTCN PAM
agaggcagaggcgggaggau

SEQ ID NO: 39021 - RNA, 20 nt, Artificial Sequence
  spacer sequence TTCN PAM
agaccagcuuggccaacaug

SEQ ID NO: 39022 - RNA, 20 nt, Artificial Sequence
  spacer sequence TTCN PAM
ccauguuggccaagcugguc

SEQ ID NO: 39023 - RNA, 20 nt, Artificial Sequence
  spacer sequence TTCN PAM
ccugccccagccucccaagu

SEQ ID NO: 39024 - RNA, 20 nt, Artificial Sequence
  spacer sequence TTCN PAM
aacgauucuccugccccagc

SEQ ID NO: 39025 - RNA, 20 nt, Artificial Sequence
  spacer sequence TTCN PAM
ugcccagaaucccagcacuc

SEQ ID NO: 39026 - RNA, 20 nt, Artificial Sequence
  spacer sequence TTCN PAM
gggcaugaaccaccacgccc

SEQ ID NO: 39027 - RNA, 20 nt, Artificial Sequence
  spacer sequence TTCN PAM
uuuuuuuuuuuuuuuuuuuu

SEQ ID NO: 39028 - RNA, 20 nt, Artificial Sequence
  spacer sequence TTCN PAM
uuccuuuuuuuuuuuuuuuu

SEQ ID NO: 39029 - RNA, 20 nt, Artificial Sequence
  spacer sequence TTCN PAM
cuucuucugacaucucucug

SEQ ID NO: 39030 - RNA, 20 nt, Artificial Sequence
  spacer sequence TTCN PAM
ucugacaucucucugccaag

SEQ ID NO: 39031 - RNA, 20 nt, Artificial Sequence
  spacer sequence TTCN PAM
gacaucucucugccaagucu

SEQ ID NO: 39032 - RNA, 20 nt, Artificial Sequence
  spacer sequence TTCN PAM
uucuuggauuucccugaauu

SEQ ID NO: 39033 - RNA, 20 nt, Artificial Sequence
  spacer sequence TTCN PAM
uggauuucccugaauucugu

SEQ ID NO: 39034 - RNA, 20 nt, Artificial Sequence
  spacer sequence TTCN PAM
cugaauucuguggccaaaga

SEQ ID NO: 39035 - RNA, 20 nt, Artificial Sequence
  spacer sequence TTCN PAM
gggaaauccaagaaagaauc

SEQ ID NO: 39036 - RNA, 20 nt, Artificial Sequence
  spacer sequence TTCN PAM
guggccaaagagagcgucug

SEQ ID NO: 39037 - RNA, 20 nt, Artificial Sequence
  spacer sequence TTCN PAM
gacgcucucuuuggccacag

SEQ ID NO: 39038 - RNA, 20 nt, Artificial Sequence
  spacer sequence TTCN PAM
cccagggggcccugcagaca

SEQ ID NO: 39039 - RNA, 20 nt, Artificial Sequence
  spacer sequence TTCN PAM
uuacagccugggccucuggg

SEQ ID NO: 39040 - RNA, 20 nt, Artificial Sequence
  spacer sequence TTCN PAM
ccacucaguccccaggcagg

SEQ ID NO: 39041 - RNA, 20 nt, Artificial Sequence
  spacer sequence TTCN PAM
guccuggccaacccuuuccu

SEQ ID NO: 39042 - RNA, 20 nt, Artificial Sequence
  spacer sequence TTCN PAM
uuggauuuucugcaaaccuc

SEQ ID NO: 39043 - RNA, 20 nt, Artificial Sequence
  spacer sequence TTCN PAM
gcaaaccucuggggucuuuu

SEQ ID NO: 39044 - RNA, 20 nt, Artificial Sequence
  spacer sequence TTCN PAM
gaccuuccucccaccuccca

SEQ ID NO: 39045 - RNA, 20 nt, Artificial Sequence
  spacer sequence TTCN PAM
ucccaccucccagagccggu

SEQ ID NO: 39046 - RNA, 20 nt, Artificial Sequence
  spacer sequence TTCN PAM
gccccggcucaggacucccc

SEQ ID NO: 39047 - RNA, 20 nt, Artificial Sequence
  spacer sequence TTCN PAM
aggggugguccgggcagccg

SEQ ID NO: 39048 - RNA, 20 nt, Artificial Sequence
  spacer sequence TTCN PAM
ccggcugcccggaccacccc

SEQ ID NO: 39049 - RNA, 20 nt, Artificial Sequence
  spacer sequence TTCN PAM
cugggaggugggguggagaa

SEQ ID NO: 39050 - RNA, 20 nt, Artificial Sequence
  spacer sequence TTCN PAM
ccaccccaccucccagagaa

SEQ ID NO: 39051 - RNA, 20 nt, Artificial Sequence
  spacer sequence TTCN PAM
ccacaaacaagaauuuccug

SEQ ID NO: 39052 - RNA, 20 nt, Artificial Sequence
  spacer sequence TTCN PAM
uguuuguggcgaaacguuga

SEQ ID NO: 39053 - RNA, 20 nt, Artificial Sequence
  spacer sequence TTCN PAM
uguuugcccuuccagggcug

SEQ ID NO: 39054 - RNA, 20 nt, Artificial Sequence
  spacer sequence TTCN PAM
agggcugggggguggcgguu

SEQ ID NO: 39055 - RNA, 20 nt, Artificial Sequence
  spacer sequence TTCN PAM
uccccucccccaccggcgcc

SEQ ID NO: 39056 - RNA, 20 nt, Artificial Sequence
  spacer sequence TTCN PAM
cuccauccccagagccacgg

SEQ ID NO: 39057 - RNA, 20 nt, Artificial Sequence
  spacer sequence TTCN PAM
gggaagaaaaccaaagagga

SEQ ID NO: 39058 - RNA, 20 nt, Artificial Sequence
  spacer sequence TTCN PAM
cagaagguugcacgcccgag

SEQ ID NO: 39059 - RNA, 20 nt, Artificial Sequence
  spacer sequence TTCN PAM
ucccagaagguugcacgccc

SEQ ID NO: 39060 - RNA, 20 nt, Artificial Sequence
  spacer sequence TTCN PAM
ucuuugguuuucuucccaga

SEQ ID NO: 39061 - RNA, 20 nt, Artificial Sequence
  spacer sequence TTCN PAM
uuccucuuugguuuucuucc

SEQ ID NO: 39062 - RNA, 20 nt, Artificial Sequence
  spacer sequence TTCN PAM
gacagagcccccuccacagc

SEQ ID NO: 39063 - RNA, 20 nt, Artificial Sequence
  spacer sequence TTCN PAM
cgcccaaacgucgccuucug

SEQ ID NO: 39064 - RNA, 20 nt, Artificial Sequence
  spacer sequence TTCN PAM
aggcagaaggaacagcgccg

SEQ ID NO: 39065 - RNA, 20 nt, Artificial Sequence
  spacer sequence TTCN PAM
gccuggaaugcagcucccgg

SEQ ID NO: 39066 - RNA, 20 nt, Artificial Sequence
  spacer sequence TTCN PAM
uucugccuggaaugcagcuc

SEQ ID NO: 39067 - RNA, 20 nt, Artificial Sequence
  spacer sequence TTCN PAM
auguaaaacgcacaggcccc

SEQ ID NO: 39068 - RNA, 20 nt, Artificial Sequence
  spacer sequence TTCN PAM
auagagacaaggucuugcua

SEQ ID NO: 39069 - RNA, 20 nt, Artificial Sequence
  spacer sequence TTCN PAM
cagacaucugagcaugaccc

SEQ ID NO: 39070 - RNA, 20 nt, Artificial Sequence
  spacer sequence TTCN PAM
ccacucagcaguuggguggg

SEQ ID NO: 39071 - RNA, 20 nt, Artificial Sequence
  spacer sequence TTCN PAM
ccuucuccgaagcagguggu

SEQ ID NO: 39072 - RNA, 20 nt, Artificial Sequence
  spacer sequence TTCN PAM
ccgaagcagguggugcuggg

SEQ ID NO: 39073 - RNA, 20 nt, Artificial Sequence
  spacer sequence TTCN PAM
gagaaggggaaaccgaggca

SEQ ID NO: 39074 - RNA, 20 nt, Artificial Sequence
  spacer sequence TTCN PAM
cagcaccaccugcuucggag

SEQ ID NO: 39075 - RNA, 20 nt, Artificial Sequence
  spacer sequence TTCN PAM
aucccccacagcaggaagug

SEQ ID NO: 39076 - RNA, 20 nt, Artificial Sequence
  spacer sequence TTCN PAM
ugcugugggggauggaaggu

SEQ ID NO: 39077 - RNA, 20 nt, Artificial Sequence
  spacer sequence TTCN PAM
cugaggggguccccuccccu

SEQ ID NO: 39078 - RNA, 20 nt, Artificial Sequence
  spacer sequence TTCN PAM
uggcaucgcacugagaaagc

SEQ ID NO: 39079 - RNA, 20 nt, Artificial Sequence
  spacer sequence TTCN PAM
cagugcgaugccaagaaaau

SEQ ID NO: 39080 - RNA, 20 nt, Artificial Sequence
  spacer sequence TTCN PAM
uuuaacaugcauuuauuagg

SEQ ID NO: 39081 - RNA, 20 nt, Artificial Sequence
  spacer sequence TTCN PAM
uaucuuguugccagcaucca

SEQ ID NO: 39082 - RNA, 20 nt, Artificial Sequence
  spacer sequence TTCN PAM
gcauguuccagggcagacag

SEQ ID NO: 39083 - RNA, 20 nt, Artificial Sequence
  spacer sequence TTCN PAM
agggcagacagacgagagac

SEQ ID NO: 39084 - RNA, 20 nt, Artificial Sequence
  spacer sequence TTCN PAM
cgcauuugucucucgucugu

SEQ ID NO: 39085 - RNA, 20 nt, Artificial Sequence
  spacer sequence TTCN PAM
ggcucacggccccccuugga

SEQ ID NO: 39086 - RNA, 20 nt, Artificial Sequence
  spacer sequence TTCN PAM
cucccuggaggggagccccc

SEQ ID NO: 39087 - RNA, 20 nt, Artificial Sequence
  spacer sequence TTCN PAM
ucuggguccccuguggucau

SEQ ID NO: 39088 - RNA, 20 nt, Artificial Sequence
  spacer sequence TTCN PAM
cuucgucuggguccccugug

SEQ ID NO: 39089 - RNA, 20 nt, Artificial Sequence
  spacer sequence TTCN PAM
cagccccuucccuucgucug

SEQ ID NO: 39090 - RNA, 20 nt, Artificial Sequence
  spacer sequence TTCN PAM
ucccgucugcgaggccuucu

SEQ ID NO: 39091 - RNA, 20 nt, Artificial Sequence
  spacer sequence TTCN PAM
ccccggcuguuccucccguc

SEQ ID NO: 39092 - RNA, 20 nt, Artificial Sequence
  spacer sequence TTCN PAM
gaacuucacacccgaccccu

SEQ ID NO: 39093 - RNA, 20 nt, Artificial Sequence
  spacer sequence TTCN PAM
gaaggugccccuccgcugag

SEQ ID NO: 39094 - RNA, 20 nt, Artificial Sequence
  spacer sequence TTCN PAM
cacccgaccccucccgugau

SEQ ID NO: 39095 - RNA, 20 nt, Artificial Sequence
  spacer sequence TTCN PAM
ggagauuuugcccaaucucc

SEQ ID NO: 39096 - RNA, 20 nt, Artificial Sequence
  spacer sequence TTCN PAM
gagcuuucugguugacguuu

SEQ ID NO: 39097 - RNA, 20 nt, Artificial Sequence
  spacer sequence TTCN PAM
gguugacguuucagaggggc

SEQ ID NO: 39098 - RNA, 20 nt, Artificial Sequence
  spacer sequence TTCN PAM
gaggggcaggguuucggcca

SEQ ID NO: 39099 - RNA, 20 nt, Artificial Sequence
  spacer sequence TTCN PAM
gccacagaacccaggugaga

SEQ ID NO: 39100 - RNA, 20 nt, Artificial Sequence
  spacer sequence TTCN PAM
guggccgaaacccugccccu

SEQ ID NO: 39101 - RNA, 20 nt, Artificial Sequence
  spacer sequence TTCN PAM
caccuggguucuguggccga

SEQ ID NO: 39102 - RNA, 20 nt, Artificial Sequence
  spacer sequence TTCN PAM
acccgggaucuggcccacaa

SEQ ID NO: 39103 - RNA, 20 nt, Artificial Sequence
  spacer sequence TTCN PAM
caucccuggggccucggcca

SEQ ID NO: 39104 - RNA, 20 nt, Artificial Sequence
  spacer sequence TTCN PAM
gcuccccuguggggggcgcc

SEQ ID NO: 39105 - RNA, 20 nt, Artificial Sequence
  spacer sequence TTCN PAM
cccaccauuuggccugggag

SEQ ID NO: 39106 - RNA, 20 nt, Artificial Sequence
  spacer sequence TTCN PAM
ccauccgggaugugagggua

SEQ ID NO: 39107 - RNA, 20 nt, Artificial Sequence
  spacer sequence TTCN PAM
cacacacucuauuugagaga

SEQ ID NO: 39108 - RNA, 20 nt, Artificial Sequence
  spacer sequence TTCN PAM
ccaucucucaaauagagugu

SEQ ID NO: 39109 - RNA, 20 nt, Artificial Sequence
  spacer sequence TTCN PAM
uguaggggcugugccaggga

SEQ ID NO: 39110 - RNA, 20 nt, Artificial Sequence
  spacer sequence TTCN PAM
cuggcacagccccuacaaga

SEQ ID NO: 39111 - RNA, 20 nt, Artificial Sequence
  spacer sequence TTCN PAM
gacccgguauuacggggucu

SEQ ID NO: 39112 - RNA, 20 nt, Artificial Sequence
  spacer sequence TTCN PAM
gcucgcccuggaagggccca

SEQ ID NO: 39113 - RNA, 20 nt, Artificial Sequence
  spacer sequence TTCN PAM
agggcgagcggaagguccuc

SEQ ID NO: 39114 - RNA, 20 nt, Artificial Sequence
  spacer sequence TTCN PAM
uagccggggggcugcguaac

SEQ ID NO: 39115 - RNA, 20 nt, Artificial Sequence
  spacer sequence TTCN PAM
uuacgcagccccccggcuaa

SEQ ID NO: 39116 - RNA, 20 nt, Artificial Sequence
  spacer sequence TTCN PAM
uuuguuuuacgcccgcgguu

SEQ ID NO: 39117 - RNA, 20 nt, Artificial Sequence
  spacer sequence TTCN PAM
cccuccguccuggagcccag

SEQ ID NO: 39118 - RNA, 20 nt, Artificial Sequence
  spacer sequence TTCN PAM
gccucucccagcuccugggg

SEQ ID NO: 39119 - RNA, 20 nt, Artificial Sequence
  spacer sequence TTCN PAM
cugugacuuuuucucaauuu

SEQ ID NO: 39120 - RNA, 20 nt, Artificial Sequence
  spacer sequence TTCN PAM
caauuugaucacgucugcaa

SEQ ID NO: 39121 - RNA, 20 nt, Artificial Sequence
  spacer sequence TTCN PAM
aaauaacgucucguucugag

SEQ ID NO: 39122 - RNA, 20 nt, Artificial Sequence
  spacer sequence TTCN PAM
gagguucugggccgauguga

SEQ ID NO: 39123 - RNA, 20 nt, Artificial Sequence
  spacer sequence TTCN PAM
gggccgaugugaauuugggu

SEQ ID NO: 39124 - RNA, 20 nt, Artificial Sequence
  spacer sequence TTCN PAM
caucggcccagaaccucaga

SEQ ID NO: 39125 - RNA, 20 nt, Artificial Sequence
  spacer sequence TTCN PAM
ccccaggacagccccagcgg

SEQ ID NO: 39126 - RNA, 20 nt, Artificial Sequence
  spacer sequence TTCN PAM
ccgcuggggcuguccugggg

SEQ ID NO: 39127 - RNA, 20 nt, Artificial Sequence
  spacer sequence TTCN PAM
aguaccugcugccucaggcg

SEQ ID NO: 39128 - RNA, 20 nt, Artificial Sequence
  spacer sequence TTCN PAM
cuggcaagcucguccugucc

SEQ ID NO: 39129 - RNA, 20 nt, Artificial Sequence
  spacer sequence TTCN PAM
cagcugcaaaagugagccgg

SEQ ID NO: 39130 - RNA, 20 nt, Artificial Sequence
  spacer sequence TTCN PAM
aguaacgagcauuuauuagg

SEQ ID NO: 39131 - RNA, 20 nt, Artificial Sequence
  spacer sequence TTCN PAM
agacucugggaacaaaacag

SEQ ID NO: 39132 - RNA, 20 nt, Artificial Sequence
  spacer sequence TTCN PAM
cagagucuggaaucagccga

SEQ ID NO: 39133 - RNA, 20 nt, Artificial Sequence
  spacer sequence TTCN PAM
uccgagaccccguccaucac

SEQ ID NO: 39134 - RNA, 20 nt, Artificial Sequence
  spacer sequence TTCN PAM
uccuccgagaccccguccau

SEQ ID NO: 39135 - RNA, 20 nt, Artificial Sequence
  spacer sequence TTCN PAM
gcugccugaggggugugggg

SEQ ID NO: 39136 - RNA, 20 nt, Artificial Sequence
  spacer sequence TTCN PAM
ccuucagcugccugaggggu

SEQ ID NO: 39137 - RNA, 20 nt, Artificial Sequence
  spacer sequence TTCN PAM
ugcgcugauuuaugguggcc

SEQ ID NO: 39138 - RNA, 20 nt, Artificial Sequence
  spacer sequence TTCN PAM
cggaaggccucacugggccu

SEQ ID NO: 39139 - RNA, 20 nt, Artificial Sequence
  spacer sequence TTCN PAM
gggaaggggcugggggggca

SEQ ID NO: 39140 - RNA, 20 nt, Artificial Sequence
  spacer sequence TTCN PAM
ccgucuguguauuggaggcc

SEQ ID NO: 39141 - RNA, 20 nt, Artificial Sequence
  spacer sequence TTCN PAM
gggcccuaaugaccgaucau

SEQ ID NO: 39142 - RNA, 20 nt, Artificial Sequence
  spacer sequence TTCN PAM
aggcuccccacugcccagcc

SEQ ID NO: 39143 - RNA, 20 nt, Artificial Sequence
  spacer sequence TTCN PAM
cccgagcuuaauuggcagcc

SEQ ID NO: 39144 - RNA, 20 nt, Artificial Sequence
  spacer sequence TTCN PAM
ggcgggggccaauuugccga

SEQ ID NO: 39145 - RNA, 20 nt, Artificial Sequence
  spacer sequence TTCN PAM
aauuaucccugccggcuuuc

SEQ ID NO: 39146 - RNA, 20 nt, Artificial Sequence
  spacer sequence TTCN PAM
cccacccugcccgcccgaac

SEQ ID NO: 39147 - RNA, 20 nt, Artificial Sequence
  spacer sequence TTCN PAM
ggcgggcagggugggggaaa

SEQ ID NO: 39148 - RNA, 20 nt, Artificial Sequence
  spacer sequence TTCN PAM
ccucuggaagacguuccggg

SEQ ID NO: 39149 - RNA, 20 nt, Artificial Sequence
  spacer sequence TTCN PAM
agaggggaaagaggcuccgu

SEQ ID NO: 39150 - RNA, 20 nt, Artificial Sequence
  spacer sequence TTCN PAM
ggggccuggugaucuucuuc

SEQ ID NO: 39151 - RNA, 20 nt, Artificial Sequence
  spacer sequence TTCN PAM
uccuccccagccaccacccu

SEQ ID NO: 39152 - RNA, 20 nt, Artificial Sequence
  spacer sequence TTCN PAM
uccccagccaccacccuggc

SEQ ID NO: 39153 - RNA, 20 nt, Artificial Sequence
  spacer sequence TTCN PAM
uagcuggaggcugagacucc

SEQ ID NO: 39154 - RNA, 20 nt, Artificial Sequence
  spacer sequence TTCN PAM
ccgcaccuggagccuggagu

SEQ ID NO: 39155 - RNA, 20 nt, Artificial Sequence
  spacer sequence TTCN PAM
caucccgguccuccugucuc

SEQ ID NO: 39156 - RNA, 20 nt, Artificial Sequence
  spacer sequence TTCN PAM
ucaccugcaaagcagagcca

SEQ ID NO: 39157 - RNA, 20 nt, Artificial Sequence
  spacer sequence TTCN PAM
cggaacaaaugcgcucccgu

SEQ ID NO: 39158 - RNA, 20 nt, Artificial Sequence
  spacer sequence TTCN PAM
gagaacuggcucugcuuugc

SEQ ID NO: 39159 - RNA, 20 nt, Artificial Sequence
  spacer sequence TTCN PAM
ccagcaugccucccggggcu

SEQ ID NO: 39160 - RNA, 20 nt, Artificial Sequence
  spacer sequence TTCN PAM
cacagcaaaucgcugcaaaa

SEQ ID NO: 39161 - RNA, 20 nt, Artificial Sequence
  spacer sequence TTCN PAM
uugggggacacaauuuaccc

SEQ ID NO: 39162 - RNA, 20 nt, Artificial Sequence
  spacer sequence TTCN PAM
caaagugcuggggucacagg

SEQ ID NO: 39163 - RNA, 20 nt, Artificial Sequence
  spacer sequence TTCN PAM
auguugcccuggcuggucuc

SEQ ID NO: 39164 - RNA, 20 nt, Artificial Sequence
  spacer sequence TTCN PAM
uuuguagagaugggucuuuc

SEQ ID NO: 39165 - RNA, 20 nt, Artificial Sequence
  spacer sequence TTCN PAM
ccugccucagcugcccaagu

SEQ ID NO: 39166 - RNA, 20 nt, Artificial Sequence
  spacer sequence TTCN PAM
agaccagccucgccaaauag

SEQ ID NO: 39167 - RNA, 20 nt, Artificial Sequence
  spacer sequence TTCN PAM
cuauuuggcgaggcuggucu

SEQ ID NO: 39168 - RNA, 20 nt, Artificial Sequence
  spacer sequence TTCN PAM
ccccccucagccuccugagu

SEQ ID NO: 39169 - RNA, 20 nt, Artificial Sequence
  spacer sequence TTCN PAM
ccauuuggccaggauggucu

SEQ ID NO: 39170 - RNA, 20 nt, Artificial Sequence
  spacer sequence TTCN PAM
ccugccucagccucuuggag

SEQ ID NO: 39171 - RNA, 20 nt, Artificial Sequence
  spacer sequence TTCN PAM
cgccauucuccugccucagc

SEQ ID NO: 39172 - RNA, 20 nt, Artificial Sequence
  spacer sequence TTCN PAM
uuuuuuuuuuuuuuuuugag

SEQ ID NO: 39173 - RNA, 20 nt, Artificial Sequence
  spacer sequence TTCN PAM
ucuuuuuuuuuuuuuuuuuu

SEQ ID NO: 39174 - RNA, 20 nt, Artificial Sequence
  spacer sequence TTCN PAM
uucuucuuuuuuuuuuuuuu

SEQ ID NO: 39175 - RNA, 20 nt, Artificial Sequence
  spacer sequence TTCN PAM
uuuucuuucuucuuuuuuuu

SEQ ID NO: 39176 - RNA, 20 nt, Artificial Sequence
  spacer sequence TTCN PAM
uuucuuuuucuuucuucuuu

SEQ ID NO: 39177 - RNA, 20 nt, Artificial Sequence
  spacer sequence TTCN PAM
agcacuggauucccaguacc

SEQ ID NO: 39178 - RNA, 20 nt, Artificial Sequence
  spacer sequence TTCN PAM
caguaccugugacaggaccu

SEQ ID NO: 39179 - RNA, 20 nt, Artificial Sequence
  spacer sequence TTCN PAM
aaaugagguccugucacagg

SEQ ID NO: 39180 - RNA, 20 nt, Artificial Sequence
  spacer sequence TTCN PAM
cccguuuccaaaugaggucc

SEQ ID NO: 39181 - RNA, 20 nt, Artificial Sequence
  spacer sequence TTCN PAM
aauccugugggaccaccguc

SEQ ID NO: 39182 - RNA, 20 nt, Artificial Sequence
  spacer sequence TTCN PAM
auauuucuaguggcucacgc

SEQ ID NO: 39183 - RNA, 20 nt, Artificial Sequence
  spacer sequence TTCN PAM
aguggcucacgccuguaauc

SEQ ID NO: 39184 - RNA, 20 nt, Artificial Sequence
  spacer sequence TTCN PAM
ccguguuagccaggaugguc

SEQ ID NO: 39185 - RNA, 20 nt, Artificial Sequence
  spacer sequence TTCN PAM
ccugccucagccucccgagu

SEQ ID NO: 39186 - RNA, 20 nt, Artificial Sequence
  spacer sequence TTCN PAM
cuccauucuccugccucagc

SEQ ID NO: 39187 - RNA, 20 nt, Artificial Sequence
  spacer sequence TTCN PAM
auauuucuugugcaccuuuu

SEQ ID NO: 39188 - RNA, 20 nt, Artificial Sequence
  spacer sequence TTCN PAM
ugugcaccuuuucuguguuc

SEQ ID NO: 39189 - RNA, 20 nt, Artificial Sequence
  spacer sequence TTCN PAM
guguucagcuguguuagacg

SEQ ID NO: 39190 - RNA, 20 nt, Artificial Sequence
  spacer sequence TTCN PAM
gcuguguuagacgcacagac

SEQ ID NO: 39191 - RNA, 20 nt, Artificial Sequence
  spacer sequence TTCN PAM
cacugacgaaaucaccaaca

SEQ ID NO: 39192 - RNA, 20 nt, Artificial Sequence
  spacer sequence TTCN PAM
ucagugugaacaucaaacag

SEQ ID NO: 39193 - RNA, 20 nt, Artificial Sequence
  spacer sequence TTCN PAM
ugcaggaugcguccugauaa

SEQ ID NO: 39194 - RNA, 20 nt, Artificial Sequence
  spacer sequence TTCN PAM
ugggcuuguggccgcgucgc

SEQ ID NO: 39195 - RNA, 20 nt, Artificial Sequence
  spacer sequence TTCN PAM
gggggcuccagguuccuggg

SEQ ID NO: 39196 - RNA, 20 nt, Artificial Sequence
  spacer sequence TTCN PAM
ugccucucacggcuucuggg

SEQ ID NO: 39197 - RNA, 20 nt, Artificial Sequence
  spacer sequence TTCN PAM
ucccuuggagacuucggagg

SEQ ID NO: 39198 - RNA, 20 nt, Artificial Sequence
  spacer sequence TTCN PAM
gagggaacgcaacccugcag

SEQ ID NO: 39199 - RNA, 20 nt, Artificial Sequence
  spacer sequence TTCN PAM
cuccgaagucuccaagggag

SEQ ID NO: 39200 - RNA, 20 nt, Artificial Sequence
  spacer sequence TTCN PAM
gucgcccaggcuggagugca

SEQ ID NO: 39201 - RNA, 20 nt, Artificial Sequence
  spacer sequence TTCN PAM
gccuccacugcccaggcuca

SEQ ID NO: 39202 - RNA, 20 nt, Artificial Sequence
  spacer sequence TTCN PAM
agaccagccugggcaacaua

SEQ ID NO: 39203 - RNA, 20 nt, Artificial Sequence
  spacer sequence TTCN PAM
cgggcucaagcgauucaccc

SEQ ID NO: 39204 - RNA, 20 nt, Artificial Sequence
  spacer sequence TTCN PAM
cccgccucccaaggugcugg

SEQ ID NO: 39205 - RNA, 20 nt, Artificial Sequence
  spacer sequence TTCN PAM
ggguggcggcucacaccugu

SEQ ID NO: 39206 - RNA, 20 nt, Artificial Sequence
  spacer sequence TTCN PAM
cuucaggguggcggcucaca

SEQ ID NO: 39207 - RNA, 20 nt, Artificial Sequence
  spacer sequence TTCN PAM
gggcuccgggaccgcgggag

SEQ ID NO: 39208 - RNA, 20 nt, Artificial Sequence
  spacer sequence TTCN PAM
cccgcggucccggagcccag

SEQ ID NO: 39209 - RNA, 20 nt, Artificial Sequence
  spacer sequence TTCN PAM
guugcuuuaagcugcaacgu

SEQ ID NO: 39210 - RNA, 20 nt, Artificial Sequence
  spacer sequence TTCN PAM
caggacaccagccugcuggu

SEQ ID NO: 39211 - RNA, 20 nt, Artificial Sequence
  spacer sequence TTCN PAM
cgggccccuggaccgggaga

SEQ ID NO: 39212 - RNA, 20 nt, Artificial Sequence
  spacer sequence TTCN PAM
ggugccuccuugcagacccu

SEQ ID NO: 39213 - RNA, 20 nt, Artificial Sequence
  spacer sequence TTCN PAM
cagagggucugcaaggaggc

SEQ ID NO: 39214 - RNA, 20 nt, Artificial Sequence
  spacer sequence TTCN PAM
ccggcauuucugucuugcag

SEQ ID NO: 39215 - RNA, 20 nt, Artificial Sequence
  spacer sequence TTCN PAM
gucuugcagccuugugguuc

SEQ ID NO: 39216 - RNA, 20 nt, Artificial Sequence
  spacer sequence TTCN PAM
ucaccugcccagcggggucu

SEQ ID NO: 39217 - RNA, 20 nt, Artificial Sequence
  spacer sequence TTCN PAM
ccugcccagcggggucuucg

SEQ ID NO: 39218 - RNA, 20 nt, Artificial Sequence
  spacer sequence TTCN PAM
gcucuggcagcggcuugagg

SEQ ID NO: 39219 - RNA, 20 nt, Artificial Sequence
  spacer sequence TTCN PAM
cacaccugagcucuggcacc

SEQ ID NO: 39220 - RNA, 20 nt, Artificial Sequence
  spacer sequence TTCN PAM
uagagcugugaggguggaga

SEQ ID NO: 39221 - RNA, 20 nt, Artificial Sequence
  spacer sequence TTCN PAM
ucuugggguccccgucgagu

SEQ ID NO: 39222 - RNA, 20 nt, Artificial Sequence
  spacer sequence TTCN PAM
uuccucuugggguccccguc

SEQ ID NO: 39223 - RNA, 20 nt, Artificial Sequence
  spacer sequence TTCN PAM
uggaugacuuguucagcuuc

SEQ ID NO: 39224 - RNA, 20 nt, Artificial Sequence
  spacer sequence TTCN PAM
gcuucaugcagaagcgaggu

SEQ ID NO: 39225 - RNA, 20 nt, Artificial Sequence
  spacer sequence TTCN PAM
ugcagaagcgaggugagccc

SEQ ID NO: 39226 - RNA, 20 nt, Artificial Sequence
  spacer sequence TTCN PAM
gcaugaagcugaacaaguca

SEQ ID NO: 39227 - RNA, 20 nt, Artificial Sequence
  spacer sequence TTCN PAM
gugaccucccuccagcgggg

SEQ ID NO: 39228 - RNA, 20 nt, Artificial Sequence
  spacer sequence TTCN PAM
ggggugucuuggggggaaac

SEQ ID NO: 39229 - RNA, 20 nt, Artificial Sequence
  spacer sequence TTCN PAM
ccccaagacaccccugaagu

SEQ ID NO: 39230 - RNA, 20 nt, Artificial Sequence
  spacer sequence TTCN PAM
ggguuggggcccugagacug

SEQ ID NO: 39231 - RNA, 20 nt, Artificial Sequence
  spacer sequence TTCN PAM
cugcacccuggaugcuaagg

SEQ ID NO: 39232 - RNA, 20 nt, Artificial Sequence
  spacer sequence TTCN PAM
acucccccauuacccaguag

SEQ ID NO: 39233 - RNA, 20 nt, Artificial Sequence
  spacer sequence TTCN PAM
ggcuggccaggugggugcag

SEQ ID NO: 39234 - RNA, 20 nt, Artificial Sequence
  spacer sequence TTCN PAM
guccugccgcaccugcaccc

SEQ ID NO: 39235 - RNA, 20 nt, Artificial Sequence
  spacer sequence TTCN PAM
caccagggccucaguuuccc

SEQ ID NO: 39236 - RNA, 20 nt, Artificial Sequence
  spacer sequence TTCN PAM
ccaucuguaaaaacgggcca

SEQ ID NO: 39237 - RNA, 20 nt, Artificial Sequence
  spacer sequence TTCN PAM
ccaccuggacaccagcccag

SEQ ID NO: 39238 - RNA, 20 nt, Artificial Sequence
  spacer sequence TTCN PAM
caggccccaccccagcuuag

SEQ ID NO: 39239 - RNA, 20 nt, Artificial Sequence
  spacer sequence TTCN PAM
gucucgccuccaaguccucg

SEQ ID NO: 39240 - RNA, 20 nt, Artificial Sequence
  spacer sequence TTCN PAM
gacgggggaggaggccuugg

SEQ ID NO: 39241 - RNA, 20 nt, Artificial Sequence
  spacer sequence TTCN PAM
gaccucugugggccccaagg

SEQ ID NO: 39242 - RNA, 20 nt, Artificial Sequence
  spacer sequence TTCN PAM
auaaacacaggccccagacc

SEQ ID NO: 39243 - RNA, 20 nt, Artificial Sequence
  spacer sequence TTCN PAM
gggcggcuggcaguggcggg

SEQ ID NO: 39244 - RNA, 20 nt, Artificial Sequence
  spacer sequence TTCN PAM
cuuccgggcggcuggcagug

SEQ ID NO: 39245 - RNA, 20 nt, Artificial Sequence
  spacer sequence TTCN PAM
cagcacgggagggguuaacu

SEQ ID NO: 39246 - RNA, 20 nt, Artificial Sequence
  spacer sequence TTCN PAM
caccugcucagcccugacca

SEQ ID NO: 39247 - RNA, 20 nt, Artificial Sequence
  spacer sequence TTCN PAM
aaguacccccaggacaccag

SEQ ID NO: 39248 - RNA, 20 nt, Artificial Sequence
  spacer sequence TTCN PAM
agaccagccuggccaacaug

SEQ ID NO: 39249 - RNA, 20 nt, Artificial Sequence
  spacer sequence TTCN PAM
ccauguuggccaggcugguc

SEQ ID NO: 39250 - RNA, 20 nt, Artificial Sequence
  spacer sequence TTCN PAM
ccugccucagccucccaagu

SEQ ID NO: 39251 - RNA, 20 nt, Artificial Sequence
  spacer sequence TTCN PAM
agcaauucuccugccucagc

SEQ ID NO: 39252 - RNA, 20 nt, Artificial Sequence
  spacer sequence TTCN PAM
cagcuuggagagggagguaa

SEQ ID NO: 39253 - RNA, 20 nt, Artificial Sequence
  spacer sequence TTCN PAM
uacaggacaggagacagcga

SEQ ID NO: 39254 - RNA, 20 nt, Artificial Sequence
  spacer sequence TTCN PAM
uuggcuuccuccaggagcuu

SEQ ID NO: 39255 - RNA, 20 nt, Artificial Sequence
  spacer sequence TTCN PAM
uccaggagcuuccugcucug

SEQ ID NO: 39256 - RNA, 20 nt, Artificial Sequence
  spacer sequence TTCN PAM
ugcucuguaaugggggcccu

SEQ ID NO: 39257 - RNA, 20 nt, Artificial Sequence
  spacer sequence TTCN PAM
cagcuccaagggcccccauu

SEQ ID NO: 39258 - RNA, 20 nt, Artificial Sequence
  spacer sequence TTCN PAM
ccugacggauucucagcucc

SEQ ID NO: 39259 - RNA, 20 nt, Artificial Sequence
  spacer sequence TTCN PAM
caaucuuccucuccuucacu

SEQ ID NO: 39260 - RNA, 20 nt, Artificial Sequence
  spacer sequence TTCN PAM
ucuccuucacuccagacaga

SEQ ID NO: 39261 - RNA, 20 nt, Artificial Sequence
  spacer sequence TTCN PAM
cuccagacagagagaaauaa

SEQ ID NO: 39262 - RNA, 20 nt, Artificial Sequence
  spacer sequence TTCN PAM
cucugucuggagugaaggag

SEQ ID NO: 39263 - RNA, 20 nt, Artificial Sequence
  spacer sequence TTCN PAM
ccugugucacaaaguaaaaa

SEQ ID NO: 39264 - RNA, 20 nt, Artificial Sequence
  spacer sequence TTCN PAM
cagaauucucugggggcuag

SEQ ID NO: 39265 - RNA, 20 nt, Artificial Sequence
  spacer sequence TTCN PAM
gagaaauuuaguuagaguuu

SEQ ID NO: 39266 - RNA, 20 nt, Artificial Sequence
  spacer sequence TTCN PAM
cugggggcuagaagugaggg

SEQ ID NO: 39267 - RNA, 20 nt, Artificial Sequence
  spacer sequence TTCN PAM
agcccccagagaauucugag

SEQ ID NO: 39268 - RNA, 20 nt, Artificial Sequence
  spacer sequence TTCN PAM
cugacaaccuccccacccuu

SEQ ID NO: 39269 - RNA, 20 nt, Artificial Sequence
  spacer sequence TTCN PAM
uuaucugggccccacgacgg

SEQ ID NO: 39270 - RNA, 20 nt, Artificial Sequence
  spacer sequence TTCN PAM
guaaacauccuccucccgcc

SEQ ID NO: 39271 - RNA, 20 nt, Artificial Sequence
  spacer sequence TTCN PAM
cagggccacgcccuggcucu

SEQ ID NO: 39272 - RNA, 20 nt, Artificial Sequence
  spacer sequence TTCN PAM
agugauuccccugccucagc

SEQ ID NO: 39273 - RNA, 20 nt, Artificial Sequence
  spacer sequence TTCN PAM
ccugccucagccuccugagu

SEQ ID NO: 39274 - RNA, 20 nt, Artificial Sequence
  spacer sequence TTCN PAM
cccuauuggccaggcugguc

SEQ ID NO: 39275 - RNA, 20 nt, Artificial Sequence
  spacer sequence TTCN PAM
agaccagccuggccaauagg

SEQ ID NO: 39276 - RNA, 20 nt, Artificial Sequence
  spacer sequence TTCN PAM
agcacuuugggaggcugagg

SEQ ID NO: 39277 - RNA, 20 nt, Artificial Sequence
  spacer sequence TTCN PAM
gggccgauccugcagcugaa

SEQ ID NO: 39278 - RNA, 20 nt, Artificial Sequence
  spacer sequence TTCN PAM
gcugcaggaucggcccggaa

SEQ ID NO: 39279 - RNA, 20 nt, Artificial Sequence
  spacer sequence TTCN PAM
ggugggaucgggucugaggc

SEQ ID NO: 39280 - RNA, 20 nt, Artificial Sequence
  spacer sequence TTCN PAM
uccaaccugggaucuccucc

SEQ ID NO: 39281 - RNA, 20 nt, Artificial Sequence
  spacer sequence TTCN PAM
cuggggguuuugcaaccugg

SEQ ID NO: 39282 - RNA, 20 nt, Artificial Sequence
  spacer sequence TTCN PAM
cagguugcaaaacccccagu

SEQ ID NO: 39283 - RNA, 20 nt, Artificial Sequence
  spacer sequence TTCN PAM
aggcccuucccagguugcaa

SEQ ID NO: 39284 - RNA, 20 nt, Artificial Sequence
  spacer sequence TTCN PAM
ggaaggucagacaccggggg

SEQ ID NO: 39285 - RNA, 20 nt, Artificial Sequence
  spacer sequence TTCN PAM
agaaacaccucccaccaccc

SEQ ID NO: 39286 - RNA, 20 nt, Artificial Sequence
  spacer sequence TTCN PAM
ggggguagcaggccucgacc

SEQ ID NO: 39287 - RNA, 20 nt, Artificial Sequence
  spacer sequence TTCN PAM
gggaugugacuggcuggaga

SEQ ID NO: 39288 - RNA, 20 nt, Artificial Sequence
  spacer sequence TTCN PAM
cugagcgccuacuguaugcc

SEQ ID NO: 39289 - RNA, 20 nt, Artificial Sequence
  spacer sequence TTCN PAM
gccuacguggggucccagca

SEQ ID NO: 39290 - RNA, 20 nt, Artificial Sequence
  spacer sequence TTCN PAM
gcacuuaggagaucaauugu

SEQ ID NO: 39291 - RNA, 20 nt, Artificial Sequence
  spacer sequence TTCN PAM
cggacagaacgauagguuua

SEQ ID NO: 39292 - RNA, 20 nt, Artificial Sequence
  spacer sequence TTCN PAM
guccgugaaauucugcacuu

SEQ ID NO: 39293 - RNA, 20 nt, Artificial Sequence
  spacer sequence TTCN PAM
gaugucagcuccaccucugc

SEQ ID NO: 39294 - RNA, 20 nt, Artificial Sequence
  spacer sequence TTCN PAM
agcccuaccugcccccucca

SEQ ID NO: 39295 - RNA, 20 nt, Artificial Sequence
  spacer sequence TTCN PAM
ugccccucaacuccuggagc

SEQ ID NO: 39296 - RNA, 20 nt, Artificial Sequence
  spacer sequence TTCN PAM
uccugggccagcccaccuac

SEQ ID NO: 39297 - RNA, 20 nt, Artificial Sequence
  spacer sequence TTCN PAM
ugggccagcccaccuaccgc

SEQ ID NO: 39298 - RNA, 20 nt, Artificial Sequence
  spacer sequence TTCN PAM
ccugccuaggcuaauccucc

SEQ ID NO: 39299 - RNA, 20 nt, Artificial Sequence
  spacer sequence TTCN PAM
cucccuggcauagcguagcc

SEQ ID NO: 39300 - RNA, 20 nt, Artificial Sequence
  spacer sequence TTCN PAM
ccucccuaggccaguccaca

SEQ ID NO: 39301 - RNA, 20 nt, Artificial Sequence
  spacer sequence TTCN PAM
ccagacuugaaauuggguaa

SEQ ID NO: 39302 - RNA, 20 nt, Artificial Sequence
  spacer sequence TTCN PAM
agucuggagaauggagggcu

SEQ ID NO: 39303 - RNA, 20 nt, Artificial Sequence
  spacer sequence TTCN PAM
cuccacacugacaggggcuc

SEQ ID NO: 39304 - RNA, 20 nt, Artificial Sequence
  spacer sequence TTCN PAM
cagaggccuguucccuccac

SEQ ID NO: 39305 - RNA, 20 nt, Artificial Sequence
  spacer sequence TTCN PAM
ccacgccacacaccacggca

SEQ ID NO: 39306 - RNA, 20 nt, Artificial Sequence
  spacer sequence TTCN PAM
uucuccacgccacacaccac

SEQ ID NO: 39307 - RNA, 20 nt, Artificial Sequence
  spacer sequence TTCN PAM
cagccuggaugauccugcac

SEQ ID NO: 39308 - RNA, 20 nt, Artificial Sequence
  spacer sequence TTCN PAM
cccagggacaccugugaacc

SEQ ID NO: 39309 - RNA, 20 nt, Artificial Sequence
  spacer sequence TTCN PAM
caggugucccugggggaagg

SEQ ID NO: 39310 - RNA, 20 nt, Artificial Sequence
  spacer sequence TTCN PAM
aacucagaggacuugagccu

SEQ ID NO: 39311 - RNA, 20 nt, Artificial Sequence
  spacer sequence TTCN PAM
ccugggccgggacccagccu

SEQ ID NO: 39312 - RNA, 20 nt, Artificial Sequence
  spacer sequence TTCN PAM
uucuccugggccgggaccca

SEQ ID NO: 39313 - RNA, 20 nt, Artificial Sequence
  spacer sequence TTCN PAM
gcgacuuccuucuccugggc

SEQ ID NO: 39314 - RNA, 20 nt, Artificial Sequence
  spacer sequence TTCN PAM
acggccagcauggccacugc

SEQ ID NO: 39315 - RNA, 20 nt, Artificial Sequence
  spacer sequence TTCN PAM
ugccgaguauccaggaccgg

SEQ ID NO: 39316 - RNA, 20 nt, Artificial Sequence
  spacer sequence TTCN PAM
ccagacgugcguuugucugc

SEQ ID NO: 39317 - RNA, 20 nt, Artificial Sequence
  spacer sequence TTCN PAM
gcgcacuucuauucacccua

SEQ ID NO: 39318 - RNA, 20 nt, Artificial Sequence
  spacer sequence TTCN PAM
auucacccuacaaaaccccg

SEQ ID NO: 39319 - RNA, 20 nt, Artificial Sequence
  spacer sequence TTCN PAM
cccuacaaaaccccggcugc

SEQ ID NO: 39320 - RNA, 20 nt, Artificial Sequence
  spacer sequence TTCN PAM
uccaugaaaccucacucccc

SEQ ID NO: 39321 - RNA, 20 nt, Artificial Sequence
  spacer sequence TTCN PAM
uggaggaaggggcacugcag

SEQ ID NO: 39322 - RNA, 20 nt, Artificial Sequence
  spacer sequence TTCN PAM
ccccuaguucaaggcucccc

SEQ ID NO: 39323 - RNA, 20 nt, Artificial Sequence
  spacer sequence TTCN PAM
aggcuccccaggggccugcc

SEQ ID NO: 39324 - RNA, 20 nt, Artificial Sequence
  spacer sequence TTCN PAM
cgggccucuucguguugcug

SEQ ID NO: 39325 - RNA, 20 nt, Artificial Sequence
  spacer sequence TTCN PAM
uguugcugugccugggccug

SEQ ID NO: 39326 - RNA, 20 nt, Artificial Sequence
  spacer sequence TTCN PAM
uccgccuggcgcugccgcgc

SEQ ID NO: 39327 - RNA, 20 nt, Artificial Sequence
  spacer sequence TTCN PAM
gccuggcgcugccgcgcauc

SEQ ID NO: 39328 - RNA, 20 nt, Artificial Sequence
  spacer sequence TTCN PAM
aagaccccagacagacccgg

SEQ ID NO: 39329 - RNA, 20 nt, Artificial Sequence
  spacer sequence TTCN PAM
accccucugguggcuccgug

SEQ ID NO: 39330 - RNA, 20 nt, Artificial Sequence
  spacer sequence TTCN PAM
gggcgagcuggugggguggu

SEQ ID NO: 39331 - RNA, 20 nt, Artificial Sequence
  spacer sequence TTCN PAM
cggaggucccccgcccaccc

SEQ ID NO: 39332 - RNA, 20 nt, Artificial Sequence
  spacer sequence TTCN PAM
guccccagcggccccgaggu

SEQ ID NO: 39333 - RNA, 20 nt, Artificial Sequence
  spacer sequence TTCN PAM
agcccuccggagccguuggc

SEQ ID NO: 39334 - RNA, 20 nt, Artificial Sequence
  spacer sequence TTCN PAM
ugcuggagcccgccgugguu

SEQ ID NO: 39335 - RNA, 20 nt, Artificial Sequence
  spacer sequence TTCN PAM
ggugccacaaccacggcggg

SEQ ID NO: 39336 - RNA, 20 nt, Artificial Sequence
  spacer sequence TTCN PAM
augcggcgcuccagcuccug

SEQ ID NO: 39337 - RNA, 20 nt, Artificial Sequence
  spacer sequence TTCN PAM
ggccagagcggcccccgcgg

SEQ ID NO: 39338 - RNA, 20 nt, Artificial Sequence
  spacer sequence TTCN PAM
uggcuccccggucggccaga

SEQ ID NO: 39339 - RNA, 20 nt, Artificial Sequence
  spacer sequence TTCN PAM
auauacaaacacaauuuugu

SEQ ID NO: 39340 - RNA, 20 nt, Artificial Sequence
  spacer sequence TTCN PAM
auuuaauugcaguguacaaa

SEQ ID NO: 39341 - RNA, 20 nt, Artificial Sequence
  spacer sequence TTCN PAM
auucuauuuaauugcagugu

SEQ ID NO: 39342 - RNA, 20 nt, Artificial Sequence
  spacer sequence TTCN PAM
uccccgagugacugguuugg

SEQ ID NO: 39343 - RNA, 20 nt, Artificial Sequence
  spacer sequence TTCN PAM
ccauggccccgcccuccccg

SEQ ID NO: 39344 - RNA, 20 nt, Artificial Sequence
  spacer sequence TTCN PAM
cugcagaccuaccaagaccc

SEQ ID NO: 39345 - RNA, 20 nt, Artificial Sequence
  spacer sequence TTCN PAM
ggaggggucuugguaggucu

SEQ ID NO: 39346 - RNA, 20 nt, Artificial Sequence
  spacer sequence TTCN PAM
gcggaaccccacccccucuc

SEQ ID NO: 39347 - RNA, 20 nt, Artificial Sequence
  spacer sequence TTCN PAM
gcggaagguucuggaggggu

SEQ ID NO: 39348 - RNA, 20 nt, Artificial Sequence
  spacer sequence TTCN PAM
ucccccuggugugaggucgc

SEQ ID NO: 39349 - RNA, 20 nt, Artificial Sequence
  spacer sequence TTCN PAM
gggcaaaccccacgaaaccc

SEQ ID NO: 39350 - RNA, 20 nt, Artificial Sequence
  spacer sequence TTCN PAM
ugggguuugcccggaaggcg

SEQ ID NO: 39351 - RNA, 20 nt, Artificial Sequence
  spacer sequence TTCN PAM
ggguuucgugggguuugccc

SEQ ID NO: 39352 - RNA, 20 nt, Artificial Sequence
  spacer sequence TTCN PAM
ucugggacugcccagccugu

SEQ ID NO: 39353 - RNA, 20 nt, Artificial Sequence
  spacer sequence TTCN PAM
cgagcccguggggguggggg

SEQ ID NO: 39354 - RNA, 20 nt, Artificial Sequence
  spacer sequence TTCN PAM
gacacaacuccccugggggc

SEQ ID NO: 39355 - RNA, 20 nt, Artificial Sequence
  spacer sequence TTCN PAM
uguccggccugagcgccucc

SEQ ID NO: 39356 - RNA, 20 nt, Artificial Sequence
  spacer sequence TTCN PAM
gccucagccugcggaguagc

SEQ ID NO: 39357 - RNA, 20 nt, Artificial Sequence
  spacer sequence TTCN PAM
ucugccucagccugcggagu

SEQ ID NO: 39358 - RNA, 20 nt, Artificial Sequence
  spacer sequence TTCN PAM
agcaauucuucugccucagc

SEQ ID NO: 39359 - RNA, 20 nt, Artificial Sequence
  spacer sequence TTCN PAM
ccacccagagaucucacagu

SEQ ID NO: 39360 - RNA, 20 nt, Artificial Sequence
  spacer sequence TTCN PAM
caguaaccccaaucccuccu

SEQ ID NO: 39361 - RNA, 20 nt, Artificial Sequence
  spacer sequence TTCN PAM
guguaggguggagacucuug

SEQ ID NO: 39362 - RNA, 20 nt, Artificial Sequence
  spacer sequence TTCN PAM
ccgucuucuguguagggugg

SEQ ID NO: 39363 - RNA, 20 nt, Artificial Sequence
  spacer sequence TTCN PAM
aaaccgggacauggugggac

SEQ ID NO: 39364 - RNA, 20 nt, Artificial Sequence
  spacer sequence TTCN PAM
cccgacggagcucagccucc

SEQ ID NO: 39365 - RNA, 20 nt, Artificial Sequence
  spacer sequence TTCN PAM
caggcuacuccauggaagga

SEQ ID NO: 39366 - RNA, 20 nt, Artificial Sequence
  spacer sequence TTCN PAM
auggaguagccugggaacag

SEQ ID NO: 39367 - RNA, 20 nt, Artificial Sequence
  spacer sequence TTCN PAM
uuccauggaguagccuggga

SEQ ID NO: 39368 - RNA, 20 nt, Artificial Sequence
  spacer sequence TTCN PAM
ggccccgucuguggacccca

SEQ ID NO: 39369 - RNA, 20 nt, Artificial Sequence
  spacer sequence TTCN PAM
cggcucugggguccacagac

SEQ ID NO: 39370 - RNA, 20 nt, Artificial Sequence
  spacer sequence TTCN PAM
cagcccugcucaggugccua

SEQ ID NO: 39371 - RNA, 20 nt, Artificial Sequence
  spacer sequence TTCN PAM
ucccugcagccccccagagu

SEQ ID NO: 39372 - RNA, 20 nt, Artificial Sequence
  spacer sequence TTCN PAM
caccuuccucccugcagccc

SEQ ID NO: 39373 - RNA, 20 nt, Artificial Sequence
  spacer sequence TTCN PAM
gugaaguggcagcaggcugg

SEQ ID NO: 39374 - RNA, 20 nt, Artificial Sequence
  spacer sequence TTCN PAM
cggaaggccccccagccucc

SEQ ID NO: 39375 - RNA, 20 nt, Artificial Sequence
  spacer sequence TTCN PAM
cagccugacacagguugguc

SEQ ID NO: 39376 - RNA, 20 nt, Artificial Sequence
  spacer sequence TTCN PAM
gcagcccccaagccccggcg

SEQ ID NO: 39377 - RNA, 20 nt, Artificial Sequence
  spacer sequence TTCN PAM
gaugcagaacgaaaacggcc

SEQ ID NO: 39378 - RNA, 20 nt, Artificial Sequence
  spacer sequence TTCN PAM
gcaucagaacaccgccgcgc

SEQ ID NO: 39379 - RNA, 20 nt, Artificial Sequence
  spacer sequence TTCN PAM
uucugcaucagaacaccgcc

SEQ ID NO: 39380 - RNA, 20 nt, Artificial Sequence
  spacer sequence TTCN PAM
ccagguggcccaggaccccg

SEQ ID NO: 39381 - RNA, 20 nt, Artificial Sequence
  spacer sequence TTCN PAM
gaggggcugcagcugcuacu

SEQ ID NO: 39382 - RNA, 20 nt, Artificial Sequence
  spacer sequence TTCN PAM
cagagggagucaggccgaug

SEQ ID NO: 39383 - RNA, 20 nt, Artificial Sequence
  spacer sequence TTCN PAM
ggagcucagguugugggucu

SEQ ID NO: 39384 - RNA, 20 nt, Artificial Sequence
  spacer sequence TTCN PAM
ugcuucaggagcucagguug

SEQ ID NO: 39385 - RNA, 20 nt, Artificial Sequence
  spacer sequence TTCN PAM
uccgcuggguccccacuccc

SEQ ID NO: 39386 - RNA, 20 nt, Artificial Sequence
  spacer sequence TTCN PAM
ccugaggcucaggagcgggg

SEQ ID NO: 39387 - RNA, 20 nt, Artificial Sequence
  spacer sequence TTCN PAM
ccgcuccugagccucagggg

SEQ ID NO: 39388 - RNA, 20 nt, Artificial Sequence
  spacer sequence TTCN PAM
gcugcguuccccgcuccuga

SEQ ID NO: 39389 - RNA, 20 nt, Artificial Sequence
  spacer sequence TTCN PAM
aggacagggguugguccgag

SEQ ID NO: 39390 - RNA, 20 nt, Artificial Sequence
  spacer sequence TTCN PAM
gggccagcacauugggaggg

SEQ ID NO: 39391 - RNA, 20 nt, Artificial Sequence
  spacer sequence TTCN PAM
gaggccucucuccccuccca

SEQ ID NO: 39392 - RNA, 20 nt, Artificial Sequence
  spacer sequence TTCN PAM
cagguccccaccuacccagg

SEQ ID NO: 39393 - RNA, 20 nt, Artificial Sequence
  spacer sequence TTCN PAM
agaguagagaacagcggcuu

SEQ ID NO: 39394 - RNA, 20 nt, Artificial Sequence
  spacer sequence TTCN PAM
cuacucuggaaaccucacug

SEQ ID NO: 39395 - RNA, 20 nt, Artificial Sequence
  spacer sequence TTCN PAM
agugcagcgggauccggccu

SEQ ID NO: 39396 - RNA, 20 nt, Artificial Sequence
  spacer sequence TTCN PAM
cggguggacguccccgggcg

SEQ ID NO: 39397 - RNA, 20 nt, Artificial Sequence
  spacer sequence TTCN PAM
ugcugcucaaggugaccgcg

SEQ ID NO: 39398 - RNA, 20 nt, Artificial Sequence
  spacer sequence TTCN PAM
ucgugcugcucaaggugacc

SEQ ID NO: 39399 - RNA, 20 nt, Artificial Sequence
  spacer sequence TTCN PAM
aguucuucgugcugcucaag

SEQ ID NO: 39400 - RNA, 20 nt, Artificial Sequence
  spacer sequence TTCN PAM
gccgucucuucgaguucuuc

SEQ ID NO: 39401 - RNA, 20 nt, Artificial Sequence
  spacer sequence TTCN PAM
cgcccgccuuccgccgucuc

SEQ ID NO: 39402 - RNA, 20 nt, Artificial Sequence
  spacer sequence TTCN PAM
cggcucuucccgcccgccuu

SEQ ID NO: 39403 - RNA, 20 nt, Artificial Sequence
  spacer sequence TTCN PAM
agauggcugucaccuauucg

SEQ ID NO: 39404 - RNA, 20 nt, Artificial Sequence
  spacer sequence TTCN PAM
ucaagauggcugucaccuau

SEQ ID NO: 39405 - RNA, 20 nt, Artificial Sequence
  spacer sequence TTCN PAM
acgcgcuguucuucaagaug

SEQ ID NO: 39406 - RNA, 20 nt, Artificial Sequence
  spacer sequence TTCN PAM
gcuuucucguccggcugcgg

SEQ ID NO: 39407 - RNA, 20 nt, Artificial Sequence
  spacer sequence TTCN PAM
cguccggcugcggcgcugcu

SEQ ID NO: 39408 - RNA, 20 nt, Artificial Sequence
  spacer sequence TTCN PAM
cugcgggcgcaggggggccg

SEQ ID NO: 39409 - RNA, 20 nt, Artificial Sequence
  spacer sequence TTCN PAM
aucacguaaaaucccauauc

SEQ ID NO: 39410 - RNA, 20 nt, Artificial Sequence
  spacer sequence TTCN PAM
ugcuuacgcuuacuuugaug

SEQ ID NO: 39411 - RNA, 20 nt, Artificial Sequence
  spacer sequence TTCN PAM
gcaacauaccacuguaggaa

SEQ ID NO: 39412 - RNA, 20 nt, Artificial Sequence
  spacer sequence TTCN PAM
uacagugguauguugcagaa

SEQ ID NO: 39413 - RNA, 20 nt, Artificial Sequence
  spacer sequence TTCN PAM
uauuuagcauaauuuccuac

SEQ ID NO: 39414 - RNA, 20 nt, Artificial Sequence
  spacer sequence TTCN PAM
aucaaaucaucuuuugguua

SEQ ID NO: 39415 - RNA, 20 nt, Artificial Sequence
  spacer sequence TTCN PAM
gcagcacauauacuaaaauu

SEQ ID NO: 39416 - RNA, 20 nt, Artificial Sequence
  spacer sequence TTCN PAM
aauuuuaguauaugugcugc

SEQ ID NO: 39417 - RNA, 20 nt, Artificial Sequence
  spacer sequence TTCN PAM
cuguaucguuccaauuuuag

SEQ ID NO: 39418 - RNA, 20 nt, Artificial Sequence
  spacer sequence TTCN PAM
ugaagcguuccauauuuuug

SEQ ID NO: 39419 - RNA, 20 nt, Artificial Sequence
  spacer sequence TTCN PAM
cgaauuugcgugucauccuu

SEQ ID NO: 39420 - RNA, 20 nt, Artificial Sequence
  spacer sequence TTCN PAM
auauuuuugcuguagucuac

SEQ ID NO: 39421 - RNA, 20 nt, Artificial Sequence
  spacer sequence TTCN PAM
cuugcccggauccugccaug

SEQ ID NO: 39422 - RNA, 20 nt, Artificial Sequence
  spacer sequence TTCN PAM
cguguccaucuccuguggcg

SEQ ID NO: 39423 - RNA, 20 nt, Artificial Sequence
  spacer sequence TTCN PAM
accgccaaccuuaguggcgc

SEQ ID NO: 39424 - RNA, 20 nt, Artificial Sequence
  spacer sequence TTCN PAM
cgcagcaaugaauaaauaag

SEQ ID NO: 39425 - RNA, 20 nt, Artificial Sequence
  spacer sequence TTCN PAM
uugcugcgcgaagcuacggg

SEQ ID NO: 39426 - RNA, 20 nt, Artificial Sequence
  spacer sequence TTCN PAM
ggggcacuuacugagugccg

SEQ ID NO: 39427 - RNA, 20 nt, Artificial Sequence
  spacer sequence TTCN PAM
cgcucugucgcccaggcugg

SEQ ID NO: 39428 - RNA, 20 nt, Artificial Sequence
  spacer sequence TTCN PAM
gcgcuccagccugggcgaca

SEQ ID NO: 39429 - RNA, 20 nt, Artificial Sequence
  spacer sequence TTCN PAM
agccauucuccugccucagc

SEQ ID NO: 39430 - RNA, 20 nt, Artificial Sequence
  spacer sequence TTCN PAM
ccugccucagccucccaagu

SEQ ID NO: 39431 - RNA, 20 nt, Artificial Sequence
  spacer sequence TTCN PAM
ccauguuggucaggcugguc

SEQ ID NO: 39432 - RNA, 20 nt, Artificial Sequence
  spacer sequence TTCN PAM
agaccagccugaccaacaug

SEQ ID NO: 39433 - RNA, 20 nt, Artificial Sequence
  spacer sequence TTCN PAM
agcaauucucugccucagcc

SEQ ID NO: 39434 - RNA, 20 nt, Artificial Sequence
  spacer sequence TTCN PAM
cugccucagccuccugaaua

SEQ ID NO: 39435 - RNA, 20 nt, Artificial Sequence
  spacer sequence TTCN PAM
ggaggcugaggcagagaauu

SEQ ID NO: 39436 - RNA, 20 nt, Artificial Sequence
  spacer sequence TTCN PAM
gccaccacacccggcuauuu

SEQ ID NO: 39437 - RNA, 20 nt, Artificial Sequence
  spacer sequence TTCN PAM
auaccaaccuggccaagaug

SEQ ID NO: 39438 - RNA, 20 nt, Artificial Sequence
  spacer sequence TTCN PAM
agcuacuugggaggcugagg

SEQ ID NO: 39439 - RNA, 20 nt, Artificial Sequence
  spacer sequence TTCN PAM
guacaacagcagaguggagu

SEQ ID NO: 39440 - RNA, 20 nt, Artificial Sequence
  spacer sequence TTCN PAM
agugucugcagacaaagcuu

SEQ ID NO: 39441 - RNA, 20 nt, Artificial Sequence
  spacer sequence TTCN PAM
aauuccagugucugcagaca

SEQ ID NO: 39442 - RNA, 20 nt, Artificial Sequence
  spacer sequence TTCN PAM
acguuugauagaaugguuuu

SEQ ID NO: 39443 - RNA, 20 nt, Artificial Sequence
  spacer sequence TTCN PAM
aucaaacguggaaauuacau

SEQ ID NO: 39444 - RNA, 20 nt, Artificial Sequence
  spacer sequence TTCN PAM
uauuuuggguuuuuuuuuca

SEQ ID NO: 39445 - RNA, 20 nt, Artificial Sequence
  spacer sequence TTCN PAM
accacuuaaaaauguaagag

SEQ ID NO: 39446 - RNA, 20 nt, Artificial Sequence
  spacer sequence TTCN PAM
uagcucacaagccauacaaa

SEQ ID NO: 39447 - RNA, 20 nt, Artificial Sequence
  spacer sequence TTCN PAM
ugaccugugggccaaaucca

SEQ ID NO: 39448 - RNA, 20 nt, Artificial Sequence
  spacer sequence TTCN PAM
aagagaaagauaagcaaaua

SEQ ID NO: 39449 - RNA, 20 nt, Artificial Sequence
  spacer sequence TTCN PAM
cuuggaaagcuguguucuug

SEQ ID NO: 39450 - RNA, 20 nt, Artificial Sequence
  spacer sequence TTCN PAM
gguagccacaguaaaacaac

SEQ ID NO: 39451 - RNA, 20 nt, Artificial Sequence
  spacer sequence TTCN PAM
cuugcucuuuuuuaguuguu

SEQ ID NO: 39452 - RNA, 20 nt, Artificial Sequence
  spacer sequence TTCN PAM
gcccagguguucaagaccag

SEQ ID NO: 39453 - RNA, 20 nt, Artificial Sequence
  spacer sequence TTCN PAM
agaccagccugggcaauaua

SEQ ID NO: 39454 - RNA, 20 nt, Artificial Sequence
  spacer sequence TTCN PAM
uagagacaggaucucauuau

SEQ ID NO: 39455 - RNA, 20 nt, Artificial Sequence
  spacer sequence TTCN PAM
uuuaugagguggggucuugc

SEQ ID NO: 39456 - RNA, 20 nt, Artificial Sequence
  spacer sequence TTCN PAM
ccguguuugccagggugguc

SEQ ID NO: 39457 - RNA, 20 nt, Artificial Sequence
  spacer sequence TTCN PAM
gccucagccucccgagcagc

SEQ ID NO: 39458 - RNA, 20 nt, Artificial Sequence
  spacer sequence TTCN PAM
ucugccucagccucccgagc

SEQ ID NO: 39459 - RNA, 20 nt, Artificial Sequence
  spacer sequence TTCN PAM
ggccauucuucugccucagc

SEQ ID NO: 39460 - RNA, 20 nt, Artificial Sequence
  spacer sequence TTCN PAM
caaaaaaaaaaaaaaaaaaa

SEQ ID NO: 39461 - RNA, 20 nt, Artificial Sequence
  spacer sequence TTCN PAM
gaaucugguguguuucccau

SEQ ID NO: 39462 - RNA, 20 nt, Artificial Sequence
  spacer sequence TTCN PAM
gaagacuugguacaucucag

SEQ ID NO: 39463 - RNA, 20 nt, Artificial Sequence
  spacer sequence TTCN PAM
cauccaugggguguuccaau

SEQ ID NO: 39464 - RNA, 20 nt, Artificial Sequence
  spacer sequence TTCN PAM
aauauggauaccagugcuuc

SEQ ID NO: 39465 - RNA, 20 nt, Artificial Sequence
  spacer sequence TTCN PAM
ucagaaauacuuaucuccac

SEQ ID NO: 39466 - RNA, 20 nt, Artificial Sequence
  spacer sequence TTCN PAM
gaggaagcacugguauccau

SEQ ID NO: 39467 - RNA, 20 nt, Artificial Sequence
  spacer sequence TTCN PAM
guauaaacgcuguaaaucua

SEQ ID NO: 39468 - RNA, 20 nt, Artificial Sequence
  spacer sequence TTCN PAM
uuuucaguauaaacgcugua

SEQ ID NO: 39469 - RNA, 20 nt, Artificial Sequence
  spacer sequence TTCN PAM
gaaacgcuaagguauuuaaa

SEQ ID NO: 39470 - RNA, 20 nt, Artificial Sequence
  spacer sequence TTCN PAM
gaauuuuccuuuucaguaua

SEQ ID NO: 39471 - RNA, 20 nt, Artificial Sequence
  spacer sequence TTCN PAM
agugauccucccgccucagc

SEQ ID NO: 39472 - RNA, 20 nt, Artificial Sequence
  spacer sequence TTCN PAM
cugcagccucgaccuccugg

SEQ ID NO: 39473 - RNA, 20 nt, Artificial Sequence
  spacer sequence TTCN PAM
aauaucuauauauuuacauu

SEQ ID NO: 39474 - RNA, 20 nt, Artificial Sequence
  spacer sequence TTCN PAM
aauacauaaauacacacaua

SEQ ID NO: 39475 - RNA, 20 nt, Artificial Sequence
  spacer sequence TTCN PAM
guuuuugacuauauauauau

SEQ ID NO: 39476 - RNA, 20 nt, Artificial Sequence
  spacer sequence TTCN PAM
guuaaaaauuaaaaacugac

SEQ ID NO: 39477 - RNA, 20 nt, Artificial Sequence
  spacer sequence TTCN PAM
auuaauuucaguuaaaaauu

SEQ ID NO: 39478 - RNA, 20 nt, Artificial Sequence
  spacer sequence TTCN PAM
gaaggcugaggccggcggau

SEQ ID NO: 39479 - RNA, 20 nt, Artificial Sequence
  spacer sequence TTCN PAM
gaagugcugggauuauaggu

SEQ ID NO: 39480 - RNA, 20 nt, Artificial Sequence
  spacer sequence TTCN PAM
agaccagccuggccaacaug

SEQ ID NO: 39481 - RNA, 20 nt, Artificial Sequence
  spacer sequence TTCN PAM
ccauguuggccaggcugguc

SEQ ID NO: 39482 - RNA, 20 nt, Artificial Sequence
  spacer sequence TTCN PAM
aaaaauggaaucuagugcca

SEQ ID NO: 39483 - RNA, 20 nt, Artificial Sequence
  spacer sequence TTCN PAM
auuuuuugaagacacauaua

SEQ ID NO: 39484 - RNA, 20 nt, Artificial Sequence
  spacer sequence TTCN PAM
auuaaaaauuaaaaacuggc

SEQ ID NO: 39485 - RNA, 20 nt, Artificial Sequence
  spacer sequence TTCN PAM
uaaauuucaauuaaaaauua

SEQ ID NO: 39486 - RNA, 20 nt, Artificial Sequence
  spacer sequence TTCN PAM
uauucuuaaauuucaauuaa

SEQ ID NO: 39487 - RNA, 20 nt, Artificial Sequence
  spacer sequence TTCN PAM
cuguguuauccaggaugguc

SEQ ID NO: 39488 - RNA, 20 nt, Artificial Sequence
  spacer sequence TTCN PAM
ccugccucagccuccccagc

SEQ ID NO: 39489 - RNA, 20 nt, Artificial Sequence
  spacer sequence TTCN PAM
cgccauucuccugccucagc

SEQ ID NO: 39490 - RNA, 20 nt, Artificial Sequence
  spacer sequence TTCN PAM
uuuuauuuuauuuuauuauu

SEQ ID NO: 39491 - RNA, 20 nt, Artificial Sequence
  spacer sequence TTCN PAM
uguucuuuuuauuuuauuuu

SEQ ID NO: 39492 - RNA, 20 nt, Artificial Sequence
  spacer sequence TTCN PAM
cugauggcaccagccacacu

SEQ ID NO: 39493 - RNA, 20 nt, Artificial Sequence
  spacer sequence TTCN PAM
agugcucaguagccccaugg

SEQ ID NO: 39494 - RNA, 20 nt, Artificial Sequence
  spacer sequence TTCN PAM
auguggcacuaucuacuacu

SEQ ID NO: 39495 - RNA, 20 nt, Artificial Sequence
  spacer sequence TTCN PAM
uucaucucagaauaacagaa

SEQ ID NO: 39496 - RNA, 20 nt, Artificial Sequence
  spacer sequence TTCN PAM
ucucagaauaacagaaaugg

SEQ ID NO: 39497 - RNA, 20 nt, Artificial Sequence
  spacer sequence TTCN PAM
gagaugaaggaaauuuucaa

SEQ ID NO: 39498 - RNA, 20 nt, Artificial Sequence
  spacer sequence TTCN PAM
guuauucugagaugaaggaa

SEQ ID NO: 39499 - RNA, 20 nt, Artificial Sequence
  spacer sequence TTCN PAM
agccuguaaucacaguacuu

SEQ ID NO: 39500 - RNA, 20 nt, Artificial Sequence
  spacer sequence TTCN PAM
agaccagccuggccaacaug

SEQ ID NO: 39501 - RNA, 20 nt, Artificial Sequence
  spacer sequence TTCN PAM
ccauguuggccaggcugguc

SEQ ID NO: 39502 - RNA, 20 nt, Artificial Sequence
  spacer sequence TTCN PAM
aaaccccaucucccuugccu

SEQ ID NO: 39503 - RNA, 20 nt, Artificial Sequence
  spacer sequence TTCN PAM
uugauuccuccgacagagcc

SEQ ID NO: 39504 - RNA, 20 nt, Artificial Sequence
  spacer sequence TTCN PAM
uccgacagagccccaacucu

SEQ ID NO: 39505 - RNA, 20 nt, Artificial Sequence
  spacer sequence TTCN PAM
uccagccccaagccucucau

SEQ ID NO: 39506 - RNA, 20 nt, Artificial Sequence
  spacer sequence TTCN PAM
guccuguacuugcucauaua

SEQ ID NO: 39507 - RNA, 20 nt, Artificial Sequence
  spacer sequence TTCN PAM
cuauaugagcaaguacagga

SEQ ID NO: 39508 - RNA, 20 nt, Artificial Sequence
  spacer sequence TTCN PAM
gccugugcuggcucauacag

SEQ ID NO: 39509 - RNA, 20 nt, Artificial Sequence
  spacer sequence TTCN PAM
cuguaugagccagcacaggc

SEQ ID NO: 39510 - RNA, 20 nt, Artificial Sequence
  spacer sequence TTCN PAM
ugggcaugggcugggccaga

SEQ ID NO: 39511 - RNA, 20 nt, Artificial Sequence
  spacer sequence TTCN PAM
agugauccucccaccucagc

SEQ ID NO: 39512 - RNA, 20 nt, Artificial Sequence
  spacer sequence TTCN PAM
agcuacugaggaggcugagg

SEQ ID NO: 39513 - RNA, 20 nt, Artificial Sequence
  spacer sequence TTCN PAM
ccauguuagccaagcugguc

SEQ ID NO: 39514 - RNA, 20 nt, Artificial Sequence
  spacer sequence TTCN PAM
agaccagcuuggcuaacaug

SEQ ID NO: 39515 - RNA, 20 nt, Artificial Sequence
  spacer sequence TTCN PAM
aaagugcugggauugcaggc

SEQ ID NO: 39516 - RNA, 20 nt, Artificial Sequence
  spacer sequence TTCN PAM
accucuugggcucaacggau

SEQ ID NO: 39517 - RNA, 20 nt, Artificial Sequence
  spacer sequence TTCN PAM
gccucagccucccaaguagc

SEQ ID NO: 39518 - RNA, 20 nt, Artificial Sequence
  spacer sequence TTCN PAM
agcuacuugggaggcugagg

SEQ ID NO: 39519 - RNA, 20 nt, Artificial Sequence
  spacer sequence TTCN PAM
uacugggugcgguagcuugc

SEQ ID NO: 39520 - RNA, 20 nt, Artificial Sequence
  spacer sequence TTCN PAM
cuuuuggacugacaaacucc

SEQ ID NO: 39521 - RNA, 20 nt, Artificial Sequence
  spacer sequence TTCN PAM
cugaggaaccugcccugguu

SEQ ID NO: 39522 - RNA, 20 nt, Artificial Sequence
  spacer sequence TTCN PAM
ucagagaaggggccauugga

SEQ ID NO: 39523 - RNA, 20 nt, Artificial Sequence
  spacer sequence TTCN PAM
cugguccaccucccagcuag

SEQ ID NO: 39524 - RNA, 20 nt, Artificial Sequence
  spacer sequence TTCN PAM
cugggaagggguuagacgcc

SEQ ID NO: 39525 - RNA, 20 nt, Artificial Sequence
  spacer sequence TTCN PAM
cagggaacucuacuagcugg

SEQ ID NO: 39526 - RNA, 20 nt, Artificial Sequence
  spacer sequence TTCN PAM
ugccccaaagguagccuucu

SEQ ID NO: 39527 - RNA, 20 nt, Artificial Sequence
  spacer sequence TTCN PAM
ccccuccccuuucuggcaga

SEQ ID NO: 39528 - RNA, 20 nt, Artificial Sequence
  spacer sequence TTCN PAM
ggcagaagagaagucugaga

SEQ ID NO: 39529 - RNA, 20 nt, Artificial Sequence
  spacer sequence TTCN PAM
gccagaaaggggaggggaga

SEQ ID NO: 39530 - RNA, 20 nt, Artificial Sequence
  spacer sequence TTCN PAM
cuucugccagaaaggggagg

SEQ ID NO: 39531 - RNA, 20 nt, Artificial Sequence
  spacer sequence TTCN PAM
ccaucucagacuucucuucu

SEQ ID NO: 39532 - RNA, 20 nt, Artificial Sequence
  spacer sequence TTCN PAM
cguggcaucaaagggggcga

SEQ ID NO: 39533 - RNA, 20 nt, Artificial Sequence
  spacer sequence TTCN PAM
ugagcccccucggucgcccc

SEQ ID NO: 39534 - RNA, 20 nt, Artificial Sequence
  spacer sequence TTCN PAM
ugcggccgcggacuuccuga

SEQ ID NO: 39535 - RNA, 20 nt, Artificial Sequence
  spacer sequence TTCN PAM
gcgccuccaggccuuauaag

SEQ ID NO: 39536 - RNA, 20 nt, Artificial Sequence
  spacer sequence TTCN PAM
acaagggccccucguacggg

SEQ ID NO: 39537 - RNA, 20 nt, Artificial Sequence
  spacer sequence TTCN PAM
ugaccucggccgacagcccg

SEQ ID NO: 39538 - RNA, 20 nt, Artificial Sequence
  spacer sequence TTCN PAM
cccugacgccuggugggggg

SEQ ID NO: 39539 - RNA, 20 nt, Artificial Sequence
  spacer sequence TTCN PAM
cgggagccucagggggugcc

SEQ ID NO: 39540 - RNA, 20 nt, Artificial Sequence
  spacer sequence TTCN PAM
cccccccaacaucuaggggu

SEQ ID NO: 39541 - RNA, 20 nt, Artificial Sequence
  spacer sequence TTCN PAM
uccccucgccauggccccag

SEQ ID NO: 39542 - RNA, 20 nt, Artificial Sequence
  spacer sequence TTCN PAM
cacguggggguccuggggcc

SEQ ID NO: 39543 - RNA, 20 nt, Artificial Sequence
  spacer sequence TTCN PAM
agaagguccguucaaggucc

SEQ ID NO: 39544 - RNA, 20 nt, Artificial Sequence
  spacer sequence TTCN PAM
cgaagguugagugggcgcca

SEQ ID NO: 39545 - RNA, 20 nt, Artificial Sequence
  spacer sequence TTCN PAM
agguccgacaacgcucuggg

SEQ ID NO: 39546 - RNA, 20 nt, Artificial Sequence
  spacer sequence TTCN PAM
gcuuuuggggccucuuagcu

SEQ ID NO: 39547 - RNA, 20 nt, Artificial Sequence
  spacer sequence TTCN PAM
ccucccaaagcuaagaggcc

SEQ ID NO: 39548 - RNA, 20 nt, Artificial Sequence
  spacer sequence TTCN PAM
caaaaaccacucggccaugc

SEQ ID NO: 39549 - RNA, 20 nt, Artificial Sequence
  spacer sequence TTCN PAM
uguuuguggggggguaacac

SEQ ID NO: 39550 - RNA, 20 nt, Artificial Sequence
  spacer sequence TTCN PAM
uggccucugggacaccuugg

SEQ ID NO: 39551 - RNA, 20 nt, Artificial Sequence
  spacer sequence TTCN PAM
cugaagguggcccugagaua

SEQ ID NO: 39552 - RNA, 20 nt, Artificial Sequence
  spacer sequence TTCN PAM
gagaaccucuuuguuauccg

SEQ ID NO: 39553 - RNA, 20 nt, Artificial Sequence
  spacer sequence TTCN PAM
aggcugcaaaaccccacaua

SEQ ID NO: 39554 - RNA, 20 nt, Artificial Sequence
  spacer sequence TTCN PAM
uucgaggcugcaaaacccca

SEQ ID NO: 39555 - RNA, 20 nt, Artificial Sequence
  spacer sequence TTCN PAM
agaccagucugggcaacaug

SEQ ID NO: 39556 - RNA, 20 nt, Artificial Sequence
  spacer sequence TTCN PAM
ccauguugcccagacugguc

SEQ ID NO: 39557 - RNA, 20 nt, Artificial Sequence
  spacer sequence TTCN PAM
agcucagagaggaccagaca

SEQ ID NO: 39558 - RNA, 20 nt, Artificial Sequence
  spacer sequence TTCN PAM
gcagggucacacagcagggu

SEQ ID NO: 39559 - RNA, 20 nt, Artificial Sequence
  spacer sequence TTCN PAM
cagggaaaguggggggcggg

SEQ ID NO: 39560 - RNA, 20 nt, Artificial Sequence
  spacer sequence TTCN PAM
cugggaauccuguccaggac

SEQ ID NO: 39561 - RNA, 20 nt, Artificial Sequence
  spacer sequence TTCN PAM
agcuggaggggggugucguc

SEQ ID NO: 39562 - RNA, 20 nt, Artificial Sequence
  spacer sequence TTCN PAM
caggugcccagugggcgucg

SEQ ID NO: 39563 - RNA, 20 nt, Artificial Sequence
  spacer sequence TTCN PAM
gcaggggaaacugccucugc

SEQ ID NO: 39564 - RNA, 20 nt, Artificial Sequence
  spacer sequence TTCN PAM
ccugcagaagucagcuguaa

SEQ ID NO: 39565 - RNA, 20 nt, Artificial Sequence
  spacer sequence TTCN PAM
cccuccagucugccggcccu

SEQ ID NO: 39566 - RNA, 20 nt, Artificial Sequence
  spacer sequence TTCN PAM
ugcuuccccgcugugagccc

SEQ ID NO: 39567 - RNA, 20 nt, Artificial Sequence
  spacer sequence TTCN PAM
ccgcugugagccccugcaag

SEQ ID NO: 39568 - RNA, 20 nt, Artificial Sequence
  spacer sequence TTCN PAM
gaccagcucuuggccaaaaa

SEQ ID NO: 39569 - RNA, 20 nt, Artificial Sequence
  spacer sequence TTCN PAM
aggggccaucugcacccugc

SEQ ID NO: 39570 - RNA, 20 nt, Artificial Sequence
  spacer sequence TTCN PAM
uagagccccccgugcagugg

SEQ ID NO: 39571 - RNA, 20 nt, Artificial Sequence
  spacer sequence TTCN PAM
agcugcccagggccacacag

SEQ ID NO: 39572 - RNA, 20 nt, Artificial Sequence
  spacer sequence TTCN PAM
ggucuuggcccugucacuug

SEQ ID NO: 39573 - RNA, 20 nt, Artificial Sequence
  spacer sequence TTCN PAM
gcaggcccagcagguacugg

SEQ ID NO: 39574 - RNA, 20 nt, Artificial Sequence
  spacer sequence TTCN PAM
ggagacgggguggggugggg

SEQ ID NO: 39575 - RNA, 20 nt, Artificial Sequence
  spacer sequence TTCN PAM
agccucuguccucacccccg

SEQ ID NO: 39576 - RNA, 20 nt, Artificial Sequence
  spacer sequence TTCN PAM
gugacccuggcaagcuggcc

SEQ ID NO: 39577 - RNA, 20 nt, Artificial Sequence
  spacer sequence TTCN PAM
aauugggaggcgacccuucc

SEQ ID NO: 39578 - RNA, 20 nt, Artificial Sequence
  spacer sequence TTCN PAM
cccuggcuucccgcucacac

SEQ ID NO: 39579 - RNA, 20 nt, Artificial Sequence
  spacer sequence TTCN PAM
cgcucacacccgcuuuaccg

SEQ ID NO: 39580 - RNA, 20 nt, Artificial Sequence
  spacer sequence TTCN PAM
agcagccgguaaagcgggug

SEQ ID NO: 39581 - RNA, 20 nt, Artificial Sequence
  spacer sequence TTCN PAM
ccguggcucaguugacuccc

SEQ ID NO: 39582 - RNA, 20 nt, Artificial Sequence
  spacer sequence TTCN PAM
cagcggguccggacccccaa

SEQ ID NO: 39583 - RNA, 20 nt, Artificial Sequence
  spacer sequence TTCN PAM
gauuuagccggggaggcagc

SEQ ID NO: 39584 - RNA, 20 nt, Artificial Sequence
  spacer sequence TTCN PAM
uggcaguuuguggugaacag

SEQ ID NO: 39585 - RNA, 20 nt, Artificial Sequence
  spacer sequence TTCN PAM
ccacaaacugccaggaaugc

SEQ ID NO: 39586 - RNA, 20 nt, Artificial Sequence
  spacer sequence TTCN PAM
uguucaccacaaacugccag

SEQ ID NO: 39587 - RNA, 20 nt, Artificial Sequence
  spacer sequence TTCN PAM
agcacauuccuguucaccac

SEQ ID NO: 39588 - RNA, 20 nt, Artificial Sequence
  spacer sequence TTCN PAM
cauuccucgggaucaaaguu

SEQ ID NO: 39589 - RNA, 20 nt, Artificial Sequence
  spacer sequence TTCN PAM
ucgggaucaaaguugccggc

SEQ ID NO: 39590 - RNA, 20 nt, Artificial Sequence
  spacer sequence TTCN PAM
acgcccgggggcagccccgc

SEQ ID NO: 39591 - RNA, 20 nt, Artificial Sequence
  spacer sequence TTCN PAM
aggcaggugccaggucaggg

SEQ ID NO: 39592 - RNA, 20 nt, Artificial Sequence
  spacer sequence TTCN PAM
aggcagaucuagcucagggg

SEQ ID NO: 39593 - RNA, 20 nt, Artificial Sequence
  spacer sequence TTCN PAM
ugggauuauuuggguuaggg

SEQ ID NO: 39594 - RNA, 20 nt, Artificial Sequence
  spacer sequence TTCN PAM
ucaucucuuccugggauuau

SEQ ID NO: 39595 - RNA, 20 nt, Artificial Sequence
  spacer sequence TTCN PAM
cgcggacagcuccccacuca

SEQ ID NO: 39596 - RNA, 20 nt, Artificial Sequence
  spacer sequence TTCN PAM
uucucucuuuucuuucuuuu

SEQ ID NO: 39597 - RNA, 20 nt, Artificial Sequence
  spacer sequence TTCN PAM
cucuuuucuuucuuuuuuuu

SEQ ID NO: 39598 - RNA, 20 nt, Artificial Sequence
  spacer sequence TTCN PAM
uucuuuuuuuuuuuaagaca

SEQ ID NO: 39599 - RNA, 20 nt, Artificial Sequence
  spacer sequence TTCN PAM
uuuuuuuuuuaagacagagg

SEQ ID NO: 39600 - RNA, 20 nt, Artificial Sequence
  spacer sequence TTCN PAM
aggcuggagugaaguggccc

SEQ ID NO: 39601 - RNA, 20 nt, Artificial Sequence
  spacer sequence TTCN PAM
cuccagccuggaacagagug

SEQ ID NO: 39602 - RNA, 20 nt, Artificial Sequence
  spacer sequence TTCN PAM
agcgauucuccugccucagc

SEQ ID NO: 39603 - RNA, 20 nt, Artificial Sequence
  spacer sequence TTCN PAM
ccugccucagccucccaagu

SEQ ID NO: 39604 - RNA, 20 nt, Artificial Sequence
  spacer sequence TTCN PAM
ccaugugggcuaggccaguc

SEQ ID NO: 39605 - RNA, 20 nt, Artificial Sequence
  spacer sequence TTCN PAM
agacuggccuagcccacaug

SEQ ID NO: 39606 - RNA, 20 nt, Artificial Sequence
  spacer sequence TTCN PAM
cccuccagcguuuaucuccc

SEQ ID NO: 39607 - RNA, 20 nt, Artificial Sequence
  spacer sequence TTCN PAM
ccacggcggugucucagagc

SEQ ID NO: 39608 - RNA, 20 nt, Artificial Sequence
  spacer sequence TTCN PAM
gugcucugagacaccgccgu

SEQ ID NO: 39609 - RNA, 20 nt, Artificial Sequence
  spacer sequence TTCN PAM
uggccuucggugcucugaga

SEQ ID NO: 39610 - RNA, 20 nt, Artificial Sequence
  spacer sequence TTCN PAM
agcuuucuuggccuucggug

SEQ ID NO: 39611 - RNA, 20 nt, Artificial Sequence
  spacer sequence TTCN PAM
gcacccggccauuccagcuu

SEQ ID NO: 39612 - RNA, 20 nt, Artificial Sequence
  spacer sequence TTCN PAM
cugccaccuuucugcacccg

SEQ ID NO: 39613 - RNA, 20 nt, Artificial Sequence
  spacer sequence TTCN PAM
ggaguugcuaagaagcagga

SEQ ID NO: 39614 - RNA, 20 nt, Artificial Sequence
  spacer sequence TTCN PAM
uagcaacucccgaaggagcu

SEQ ID NO: 39615 - RNA, 20 nt, Artificial Sequence
  spacer sequence TTCN PAM
ccguguuagccaagaugguc

SEQ ID NO: 39616 - RNA, 20 nt, Artificial Sequence
  spacer sequence TTCN PAM
ccugccucagccucccgagu

SEQ ID NO: 39617 - RNA, 20 nt, Artificial Sequence
  spacer sequence TTCN PAM
ggccauucuccugccucagc

SEQ ID NO: 39618 - RNA, 20 nt, Artificial Sequence
  spacer sequence TTCN PAM
uuuuuauuuuuuuugagaca

SEQ ID NO: 39619 - RNA, 20 nt, Artificial Sequence
  spacer sequence TTCN PAM
uacgucugcaauguugugca

SEQ ID NO: 39620 - RNA, 20 nt, Artificial Sequence
  spacer sequence TTCN PAM
cagcauuucguacgucugca

SEQ ID NO: 39621 - RNA, 20 nt, Artificial Sequence
  spacer sequence TTCN PAM
ggugguugaagugguaaacg

SEQ ID NO: 39622 - RNA, 20 nt, Artificial Sequence
  spacer sequence TTCN PAM
accaccugaaaccgcaccau

SEQ ID NO: 39623 - RNA, 20 nt, Artificial Sequence
  spacer sequence TTCN PAM
caccuccccgcuauaucaca

SEQ ID NO: 39624 - RNA, 20 nt, Artificial Sequence
  spacer sequence TTCN PAM
aagccgguugucggccugcu

SEQ ID NO: 39625 - RNA, 20 nt, Artificial Sequence
  spacer sequence TTCN PAM
caucauugggggcgccccag

SEQ ID NO: 39626 - RNA, 20 nt, Artificial Sequence
  spacer sequence TTCN PAM
gugggguuccugcugggggu

SEQ ID NO: 39627 - RNA, 20 nt, Artificial Sequence
  spacer sequence TTCN PAM
ugcugggggugcccccagcc

SEQ ID NO: 39628 - RNA, 20 nt, Artificial Sequence
  spacer sequence TTCN PAM
gggggucauauuuggacagg

SEQ ID NO: 39629 - RNA, 20 nt, Artificial Sequence
  spacer sequence TTCN PAM
agaagggccugaaggaugga

SEQ ID NO: 39630 - RNA, 20 nt, Artificial Sequence
  spacer sequence TTCN PAM
ggaagucggggccgauggag

SEQ ID NO: 39631 - RNA, 20 nt, Artificial Sequence
  spacer sequence TTCN PAM
ggcccuucuggaagucgggg

SEQ ID NO: 39632 - RNA, 20 nt, Artificial Sequence
  spacer sequence TTCN PAM
auccuucaggcccuucugga

SEQ ID NO: 39633 - RNA, 20 nt, Artificial Sequence
  spacer sequence TTCN PAM
cacuuuuuuucuuaauuaag

SEQ ID NO: 39634 - RNA, 20 nt, Artificial Sequence
  spacer sequence TTCN PAM
uaauuaagaaauuuuugggg

SEQ ID NO: 39635 - RNA, 20 nt, Artificial Sequence
  spacer sequence TTCN PAM
uaauuaagaaaaaaagugag

SEQ ID NO: 39636 - RNA, 20 nt, Artificial Sequence
  spacer sequence TTCN PAM
ccguguuggccaggcuggac

SEQ ID NO: 39637 - RNA, 20 nt, Artificial Sequence
  spacer sequence TTCN PAM
aguccagccuggccaacacg

SEQ ID NO: 39638 - RNA, 20 nt, Artificial Sequence
  spacer sequence TTCN PAM
cugggugcacuggcucacgc

SEQ ID NO: 39639 - RNA, 20 nt, Artificial Sequence
  spacer sequence TTCN PAM
cuccaccaugaccugcucca

SEQ ID NO: 39640 - RNA, 20 nt, Artificial Sequence
  spacer sequence TTCN PAM
ucuccaggugggcaugacgg

SEQ ID NO: 39641 - RNA, 20 nt, Artificial Sequence
  spacer sequence TTCN PAM
cagcuugguaucauagaugu

SEQ ID NO: 39642 - RNA, 20 nt, Artificial Sequence
  spacer sequence TTCN PAM
gccugggccggcagauauau

SEQ ID NO: 39643 - RNA, 20 nt, Artificial Sequence
  spacer sequence TTCN PAM
gggaccucccccggguccgg

SEQ ID NO: 39644 - RNA, 20 nt, Artificial Sequence
  spacer sequence TTCN PAM
guguuuucaucuuuuuuuuu

SEQ ID NO: 39645 - RNA, 20 nt, Artificial Sequence
  spacer sequence TTCN PAM
ucuuuuuuuuuuuuuucuua

SEQ ID NO: 39646 - RNA, 20 nt, Artificial Sequence
  spacer sequence TTCN PAM
uaacccguucagugcugcca

SEQ ID NO: 39647 - RNA, 20 nt, Artificial Sequence
  spacer sequence TTCN PAM
gugcugccagucaaccaagg

SEQ ID NO: 39648 - RNA, 20 nt, Artificial Sequence
  spacer sequence TTCN PAM
ccuuugccuugauccuucgc

SEQ ID NO: 39649 - RNA, 20 nt, Artificial Sequence
  spacer sequence TTCN PAM
caaggcugagccacugggcu

SEQ ID NO: 39650 - RNA, 20 nt, Artificial Sequence
  spacer sequence TTCN PAM
cccacagcccaguggcucag

SEQ ID NO: 39651 - RNA, 20 nt, Artificial Sequence
  spacer sequence TTCN PAM
ggcugugcugggaagaagag

SEQ ID NO: 39652 - RNA, 20 nt, Artificial Sequence
  spacer sequence TTCN PAM
cagcacagccugaaugugcc

SEQ ID NO: 39653 - RNA, 20 nt, Artificial Sequence
  spacer sequence TTCN PAM
ucccagcacagccugaaugu

SEQ ID NO: 39654 - RNA, 20 nt, Artificial Sequence
  spacer sequence TTCN PAM
aagcccaggucucuucuucc

SEQ ID NO: 39655 - RNA, 20 nt, Artificial Sequence
  spacer sequence TTCN PAM
uuccaagcccaggucucuuc

SEQ ID NO: 39656 - RNA, 20 nt, Artificial Sequence
  spacer sequence TTCN PAM
gcuugccucgccucuucccc

SEQ ID NO: 39657 - RNA, 20 nt, Artificial Sequence
  spacer sequence TTCN PAM
cccuuuugucagcugagcag

SEQ ID NO: 39658 - RNA, 20 nt, Artificial Sequence
  spacer sequence TTCN PAM
augcccgcaaguuucaggaa

SEQ ID NO: 39659 - RNA, 20 nt, Artificial Sequence
  spacer sequence TTCN PAM
ggaaguauucacaaaagaaa

SEQ ID NO: 39660 - RNA, 20 nt, Artificial Sequence
  spacer sequence TTCN PAM
ugaaacuugcgggcauagaa

SEQ ID NO: 39661 - RNA, 20 nt, Artificial Sequence
  spacer sequence TTCN PAM
caaaagaaaaauacauuuuu

SEQ ID NO: 39662 - RNA, 20 nt, Artificial Sequence
  spacer sequence TTCN PAM
uuugugaauacuuccugaaa

SEQ ID NO: 39663 - RNA, 20 nt, Artificial Sequence
  spacer sequence TTCN PAM
cccagggguggggcaaggac

SEQ ID NO: 39664 - RNA, 20 nt, Artificial Sequence
  spacer sequence TTCN PAM
uagcacucucuccacugucc

SEQ ID NO: 39665 - RNA, 20 nt, Artificial Sequence
  spacer sequence TTCN PAM
caggggacucauuuccuagc

SEQ ID NO: 39666 - RNA, 20 nt, Artificial Sequence
  spacer sequence TTCN PAM
gaccaacagacuucagaccc

SEQ ID NO: 39667 - RNA, 20 nt, Artificial Sequence
  spacer sequence TTCN PAM
gacccucagaccugccccgg

SEQ ID NO: 39668 - RNA, 20 nt, Artificial Sequence
  spacer sequence TTCN PAM
ccaccuggccccggggcagg

SEQ ID NO: 39669 - RNA, 20 nt, Artificial Sequence
  spacer sequence TTCN PAM
uuguacggcccucacuuucu

SEQ ID NO: 39670 - RNA, 20 nt, Artificial Sequence
  spacer sequence TTCN PAM
cuuccuuguacggcccucac

SEQ ID NO: 39671 - RNA, 20 nt, Artificial Sequence
  spacer sequence TTCN PAM
gaguuguuggggcuaagccu

SEQ ID NO: 39672 - RNA, 20 nt, Artificial Sequence
  spacer sequence TTCN PAM
guugugguuguugcccaggc

SEQ ID NO: 39673 - RNA, 20 nt, Artificial Sequence
  spacer sequence TTCN PAM
gggcucaagcgauucuccag

SEQ ID NO: 39674 - RNA, 20 nt, Artificial Sequence
  spacer sequence TTCN PAM
ccagccucagccuccugagu

SEQ ID NO: 39675 - RNA, 20 nt, Artificial Sequence
  spacer sequence TTCN PAM
ccauguuggccaggcugguc

SEQ ID NO: 39676 - RNA, 20 nt, Artificial Sequence
  spacer sequence TTCN PAM
agaccagccuggccaacaug

SEQ ID NO: 39677 - RNA, 20 nt, Artificial Sequence
  spacer sequence TTCN PAM
gggcccgaccagcuuauacu

SEQ ID NO: 39678 - RNA, 20 nt, Artificial Sequence
  spacer sequence TTCN PAM
ccggccacaugccccgccaa

SEQ ID NO: 39679 - RNA, 20 nt, Artificial Sequence
  spacer sequence TTCN PAM
cauuaucucacggagcaggu

SEQ ID NO: 39680 - RNA, 20 nt, Artificial Sequence
  spacer sequence TTCN PAM
uacaaacagagguuuuauug

SEQ ID NO: 39681 - RNA, 20 nt, Artificial Sequence
  spacer sequence TTCN PAM
cuucguacaaacagagguuu

SEQ ID NO: 39682 - RNA, 20 nt, Artificial Sequence
  spacer sequence TTCN PAM
ccuugauccccccauccccc

SEQ ID NO: 39683 - RNA, 20 nt, Artificial Sequence
  spacer sequence TTCN PAM
gcuuuugcuccuccucccaa

SEQ ID NO: 39684 - RNA, 20 nt, Artificial Sequence
  spacer sequence TTCN PAM
acccagacucaccuguggcu

SEQ ID NO: 39685 - RNA, 20 nt, Artificial Sequence
  spacer sequence TTCN PAM
uuccacccagacucaccugu

SEQ ID NO: 39686 - RNA, 20 nt, Artificial Sequence
  spacer sequence TTCN PAM
aaucauucauuccacccaga

SEQ ID NO: 39687 - RNA, 20 nt, Artificial Sequence
  spacer sequence TTCN PAM
uggccauuuggagaagaggc

SEQ ID NO: 39688 - RNA, 20 nt, Artificial Sequence
  spacer sequence TTCN PAM
ccaaauggccaggaagccca

SEQ ID NO: 39689 - RNA, 20 nt, Artificial Sequence
  spacer sequence TTCN PAM
cucaaaugccccccaugcgc

SEQ ID NO: 39690 - RNA, 20 nt, Artificial Sequence
  spacer sequence TTCN PAM
ccaacggggagacauccagg

SEQ ID NO: 39691 - RNA, 20 nt, Artificial Sequence
  spacer sequence TTCN PAM
aagcuguggacccacacgcu

SEQ ID NO: 39692 - RNA, 20 nt, Artificial Sequence
  spacer sequence TTCN PAM
gcuucaccuccagccugaag

SEQ ID NO: 39693 - RNA, 20 nt, Artificial Sequence
  spacer sequence TTCN PAM
ccuccagccugaagaguuua

SEQ ID NO: 39694 - RNA, 20 nt, Artificial Sequence
  spacer sequence TTCN PAM
ggcuggaggugaagcugaaa

SEQ ID NO: 39695 - RNA, 20 nt, Artificial Sequence
  spacer sequence TTCN PAM
acucuucuuccagaguggga

SEQ ID NO: 39696 - RNA, 20 nt, Artificial Sequence
  spacer sequence TTCN PAM
uccagagugggaaacggguu

SEQ ID NO: 39697 - RNA, 20 nt, Artificial Sequence
  spacer sequence TTCN PAM
agagugggaaacggguuuuc

SEQ ID NO: 39698 - RNA, 20 nt, Artificial Sequence
  spacer sequence TTCN PAM
cacucuggaagaagaguuga

SEQ ID NO: 39699 - RNA, 20 nt, Artificial Sequence
  spacer sequence TTCN PAM
ucaaaaucaggguagccacu

SEQ ID NO: 39700 - RNA, 20 nt, Artificial Sequence
  spacer sequence TTCN PAM
agagucuccgauuauagugg

SEQ ID NO: 39701 - RNA, 20 nt, Artificial Sequence
  spacer sequence TTCN PAM
gcagaggauggcaggagggg

SEQ ID NO: 39702 - RNA, 20 nt, Artificial Sequence
  spacer sequence TTCN PAM
uggaaugaaugaaugaacga

SEQ ID NO: 39703 - RNA, 20 nt, Artificial Sequence
  spacer sequence TTCN PAM
acgaacgcuccucggcuucu

SEQ ID NO: 39704 - RNA, 20 nt, Artificial Sequence
  spacer sequence TTCN PAM
uuccacgaacgcuccucggc

SEQ ID NO: 39705 - RNA, 20 nt, Artificial Sequence
  spacer sequence TTCN PAM
uucauuccacgaacgcuccu

SEQ ID NO: 39706 - RNA, 20 nt, Artificial Sequence
  spacer sequence TTCN PAM
uucauucauuccacgaacgc

SEQ ID NO: 39707 - RNA, 20 nt, Artificial Sequence
  spacer sequence TTCN PAM
uucauucauucauuccacga

SEQ ID NO: 39708 - RNA, 20 nt, Artificial Sequence
  spacer sequence TTCN PAM
acuagaucauucguucauuc

SEQ ID NO: 39709 - RNA, 20 nt, Artificial Sequence
  spacer sequence TTCN PAM
cucuguccccgcuguccccg

SEQ ID NO: 39710 - RNA, 20 nt, Artificial Sequence
  spacer sequence TTCN PAM
gagcugcgguauugcagccg

SEQ ID NO: 39711 - RNA, 20 nt, Artificial Sequence
  spacer sequence TTCN PAM
cggagggcggccugccuggg

SEQ ID NO: 39712 - RNA, 20 nt, Artificial Sequence
  spacer sequence TTCN PAM
uaaagggaccgcgcggcucu

SEQ ID NO: 39713 - RNA, 20 nt, Artificial Sequence
  spacer sequence TTCN PAM
gugaucccgucuccucccuu

SEQ ID NO: 39714 - RNA, 20 nt, Artificial Sequence
  spacer sequence TTCN PAM
cuccgcccagcagcaggcag

SEQ ID NO: 39715 - RNA, 20 nt, Artificial Sequence
  spacer sequence TTCN PAM
aggggcuccgcagcucuugc

SEQ ID NO: 39716 - RNA, 20 nt, Artificial Sequence
  spacer sequence TTCN PAM
caccuuccaggggcuccgca

SEQ ID NO: 39717 - RNA, 20 nt, Artificial Sequence
  spacer sequence TTCN PAM
cucuccgaguccuucucacc

SEQ ID NO: 39718 - RNA, 20 nt, Artificial Sequence
  spacer sequence TTCN PAM
ucccucuccgaguccuucuc

SEQ ID NO: 39719 - RNA, 20 nt, Artificial Sequence
  spacer sequence TTCN PAM
cgagucucgggccuucuucc

SEQ ID NO: 39720 - RNA, 20 nt, Artificial Sequence
  spacer sequence TTCN PAM
cugggaauuaggggguccag

SEQ ID NO: 39721 - RNA, 20 nt, Artificial Sequence
  spacer sequence TTCN PAM
cagggaacuugcaucccucc

SEQ ID NO: 39722 - RNA, 20 nt, Artificial Sequence
  spacer sequence TTCN PAM
ggugaauguugacgacggcu

SEQ ID NO: 39723 - RNA, 20 nt, Artificial Sequence
  spacer sequence TTCN PAM
ccggaaggaggucagaggcu

SEQ ID NO: 39724 - RNA, 20 nt, Artificial Sequence
  spacer sequence TTCN PAM
gccgucgucaacauucaccg

SEQ ID NO: 39725 - RNA, 20 nt, Artificial Sequence
  spacer sequence TTCN PAM
caaggggggcaucggacauc

SEQ ID NO: 39726 - RNA, 20 nt, Artificial Sequence
  spacer sequence TTCN PAM
aacgggcagggggcugcagg

SEQ ID NO: 39727 - RNA, 20 nt, Artificial Sequence
  spacer sequence TTCN PAM
ccauuuguaagacggggcaa

SEQ ID NO: 39728 - RNA, 20 nt, Artificial Sequence
  spacer sequence TTCN PAM
uuuacaucaagcgggacuua

SEQ ID NO: 39729 - RNA, 20 nt, Artificial Sequence
  spacer sequence TTCN PAM
uuccuuuacaucaagcggga

SEQ ID NO: 39730 - RNA, 20 nt, Artificial Sequence
  spacer sequence TTCN PAM
ggccuggucaccuuuagcaa

SEQ ID NO: 39731 - RNA, 20 nt, Artificial Sequence
  spacer sequence TTCN PAM
ugccccucugucagcgucag

SEQ ID NO: 39732 - RNA, 20 nt, Artificial Sequence
  spacer sequence TTCN PAM
ccaucugugucagaggugga

SEQ ID NO: 39733 - RNA, 20 nt, Artificial Sequence
  spacer sequence TTCN PAM
uugggccgguccaccucuga

SEQ ID NO: 39734 - RNA, 20 nt, Artificial Sequence
  spacer sequence TTCN PAM
ugaucuauuuuccuugggcc

SEQ ID NO: 39735 - RNA, 20 nt, Artificial Sequence
  spacer sequence TTCN PAM
ccugacucuuucucuggcuc

SEQ ID NO: 39736 - RNA, 20 nt, Artificial Sequence
  spacer sequence TTCN PAM
cuggcucccgcggucccucu

SEQ ID NO: 39737 - RNA, 20 nt, Artificial Sequence
  spacer sequence TTCN PAM
ugggccucgguuuccacuuc

SEQ ID NO: 39738 - RNA, 20 nt, Artificial Sequence
  spacer sequence TTCN PAM
acuucuguagagugggguga

SEQ ID NO: 39739 - RNA, 20 nt, Artificial Sequence
  spacer sequence TTCN PAM
guagaguggggugauagucc

SEQ ID NO: 39740 - RNA, 20 nt, Artificial Sequence
  spacer sequence TTCN PAM
ccugggcgugugaaaugucc

SEQ ID NO: 39741 - RNA, 20 nt, Artificial Sequence
  spacer sequence TTCN PAM
cacgcccaggggaagugcug

SEQ ID NO: 39742 - RNA, 20 nt, Artificial Sequence
  spacer sequence TTCN PAM
uugcuguuaucuucggagaa

SEQ ID NO: 39743 - RNA, 20 nt, Artificial Sequence
  spacer sequence TTCN PAM
gagaacagugaggggaaagg

SEQ ID NO: 39744 - RNA, 20 nt, Artificial Sequence
  spacer sequence TTCN PAM
ccgaagauaacagcaacgaa

SEQ ID NO: 39745 - RNA, 20 nt, Artificial Sequence
  spacer sequence TTCN PAM
ccucacuguucuccgaagau

SEQ ID NO: 39746 - RNA, 20 nt, Artificial Sequence
  spacer sequence TTCN PAM
uuuccccucacuguucuccg

SEQ ID NO: 39747 - RNA, 20 nt, Artificial Sequence
  spacer sequence TTCN PAM
agguccugacccccagccuc

SEQ ID NO: 39748 - RNA, 20 nt, Artificial Sequence
  spacer sequence TTCN PAM
aggugaggcuugggguggag

SEQ ID NO: 39749 - RNA, 20 nt, Artificial Sequence
  spacer sequence TTCN PAM
ucaccaggcuccaccccaag

SEQ ID NO: 39750 - RNA, 20 nt, Artificial Sequence
  spacer sequence TTCN PAM
aggaacccugcgcuguggga

SEQ ID NO: 39751 - RNA, 20 nt, Artificial Sequence
  spacer sequence TTCN PAM
uggaagcucugauuagagcg

SEQ ID NO: 39752 - RNA, 20 nt, Artificial Sequence
  spacer sequence TTCN PAM
uuuaucccacagcgcagggu

SEQ ID NO: 39753 - RNA, 20 nt, Artificial Sequence
  spacer sequence TTCN PAM
gaaaggggcagggaguugcc

SEQ ID NO: 39754 - RNA, 20 nt, Artificial Sequence
  spacer sequence TTCN PAM
gaaccucauuccuuuauccc

SEQ ID NO: 39755 - RNA, 20 nt, Artificial Sequence
  spacer sequence TTCN PAM
gcccgaccguuguccugacc

SEQ ID NO: 39756 - RNA, 20 nt, Artificial Sequence
  spacer sequence TTCN PAM
ggacacagcugaugcugcug

SEQ ID NO: 39757 - RNA, 20 nt, Artificial Sequence
  spacer sequence TTCN PAM
agagcagcagcaucagcugu

SEQ ID NO: 39758 - RNA, 20 nt, Artificial Sequence
  spacer sequence TTCN PAM
uccagagcagcagcaucagc

SEQ ID NO: 39759 - RNA, 20 nt, Artificial Sequence
  spacer sequence TTCN PAM
uguaucgccggagacagccg

SEQ ID NO: 39760 - RNA, 20 nt, Artificial Sequence
  spacer sequence TTCN PAM
cccccagguccagcuccugg

SEQ ID NO: 39761 - RNA, 20 nt, Artificial Sequence
  spacer sequence TTCN PAM
accaggagcuggaccugggg

SEQ ID NO: 39762 - RNA, 20 nt, Artificial Sequence
  spacer sequence TTCN PAM
ucuucuucauccugguggcu

SEQ ID NO: 39763 - RNA, 20 nt, Artificial Sequence
  spacer sequence TTCN PAM
ucauccugguggcuguucgc

SEQ ID NO: 39764 - RNA, 20 nt, Artificial Sequence
  spacer sequence TTCN PAM
uccugguggcuguucgccac

SEQ ID NO: 39765 - RNA, 20 nt, Artificial Sequence
  spacer sequence TTCN PAM
ccacucccacccgccccugg

SEQ ID NO: 39766 - RNA, 20 nt, Artificial Sequence
  spacer sequence TTCN PAM
uggugcuccaggggcgggug

SEQ ID NO: 39767 - RNA, 20 nt, Artificial Sequence
  spacer sequence TTCN PAM
ccuacacacacaaagugccu

SEQ ID NO: 39768 - RNA, 20 nt, Artificial Sequence
  spacer sequence TTCN PAM
ugugcacgggugagccaucu

SEQ ID NO: 39769 - RNA, 20 nt, Artificial Sequence
  spacer sequence TTCN PAM
ccaggccgccaauacauggc

SEQ ID NO: 39770 - RNA, 20 nt, Artificial Sequence
  spacer sequence TTCN PAM
caaacaagccacugccaucg

SEQ ID NO: 39771 - RNA, 20 nt, Artificial Sequence
  spacer sequence TTCN PAM
cauuacagaugagacccugg

SEQ ID NO: 39772 - RNA, 20 nt, Artificial Sequence
  spacer sequence TTCN PAM
gcagcugacaccgggcgagg

SEQ ID NO: 39773 - RNA, 20 nt, Artificial Sequence
  spacer sequence TTCN PAM
acgacucccugugagccaga

SEQ ID NO: 39774 - RNA, 20 nt, Artificial Sequence
  spacer sequence TTCN PAM
ggccggcacugcagccccga

SEQ ID NO: 39775 - RNA, 20 nt, Artificial Sequence
  spacer sequence TTCN PAM
cuaggccagccagcguccug

SEQ ID NO: 39776 - RNA, 20 nt, Artificial Sequence
  spacer sequence TTCN PAM
cggcccggcaaguugaggcu

SEQ ID NO: 39777 - RNA, 20 nt, Artificial Sequence
  spacer sequence TTCN PAM
aguggagacugcuugguugg

SEQ ID NO: 39778 - RNA, 20 nt, Artificial Sequence
  spacer sequence TTCN PAM
ugggacacugcacuggggau

SEQ ID NO: 39779 - RNA, 20 nt, Artificial Sequence
  spacer sequence TTCN PAM
aggcauccaggcugucccug

SEQ ID NO: 39780 - RNA, 20 nt, Artificial Sequence
  spacer sequence TTCN PAM
ucacugggucagacacacuc

SEQ ID NO: 39781 - RNA, 20 nt, Artificial Sequence
  spacer sequence TTCN PAM
cuauuuguaaagugggggcu

SEQ ID NO: 39782 - RNA, 20 nt, Artificial Sequence
  spacer sequence TTCN PAM
caggcagaccauacuaucau

SEQ ID NO: 39783 - RNA, 20 nt, Artificial Sequence
  spacer sequence TTCN PAM
aaaucauugucccccuugug

SEQ ID NO: 39784 - RNA, 20 nt, Artificial Sequence
  spacer sequence TTCN PAM
ccccaggaaucccugggguu

SEQ ID NO: 39785 - RNA, 20 nt, Artificial Sequence
  spacer sequence TTCN PAM
uggggagaaagaccacaagg

SEQ ID NO: 39786 - RNA, 20 nt, Artificial Sequence
  spacer sequence TTCN PAM
cuuggguggguuuucaggag

SEQ ID NO: 39787 - RNA, 20 nt, Artificial Sequence
  spacer sequence TTCN PAM
ggaggauuagacagcgagag

SEQ ID NO: 39788 - RNA, 20 nt, Artificial Sequence
  spacer sequence TTCN PAM
ggcacugcugcagagacccc

SEQ ID NO: 39789 - RNA, 20 nt, Artificial Sequence
  spacer sequence TTCN PAM
ggcuccugccccaccagcuc

SEQ ID NO: 39790 - RNA, 20 nt, Artificial Sequence
  spacer sequence TTCN PAM
ccucuugggaaguggaacuc

SEQ ID NO: 39791 - RNA, 20 nt, Artificial Sequence
  spacer sequence TTCN PAM
caagaggggaaaccgagguc

SEQ ID NO: 39792 - RNA, 20 nt, Artificial Sequence
  spacer sequence TTCN PAM
acuucccaagaggggaaacc

SEQ ID NO: 39793 - RNA, 20 nt, Artificial Sequence
  spacer sequence TTCN PAM
ggcgucuccagagcaggcgg

SEQ ID NO: 39794 - RNA, 20 nt, Artificial Sequence
  spacer sequence TTCN PAM
cgaggaucagaggcuucagg

SEQ ID NO: 39795 - RNA, 20 nt, Artificial Sequence
  spacer sequence TTCN PAM
ggguaaaagguguaucuggu

SEQ ID NO: 39796 - RNA, 20 nt, Artificial Sequence
  spacer sequence TTCN PAM
uacucaaaaagcaaggaggu

SEQ ID NO: 39797 - RNA, 20 nt, Artificial Sequence
  spacer sequence TTCN PAM
cacccugaccuccuugcuuu

SEQ ID NO: 39798 - RNA, 20 nt, Artificial Sequence
  spacer sequence TTCN PAM
ggccuuccagcagagggcau

SEQ ID NO: 39799 - RNA, 20 nt, Artificial Sequence
  spacer sequence TTCN PAM
agcagagggcauauguggcc

SEQ ID NO: 39800 - RNA, 20 nt, Artificial Sequence
  spacer sequence TTCN PAM
uacugaccccuuacugccuu

SEQ ID NO: 39801 - RNA, 20 nt, Artificial Sequence
  spacer sequence TTCN PAM
acauuaaugcugcugagaua

SEQ ID NO: 39802 - RNA, 20 nt, Artificial Sequence
  spacer sequence TTCN PAM
aucucagcagcauuaaugug

SEQ ID NO: 39803 - RNA, 20 nt, Artificial Sequence
  spacer sequence TTCN PAM
guggugugccaagguggccu

SEQ ID NO: 39804 - RNA, 20 nt, Artificial Sequence
  spacer sequence TTCN PAM
aaggcagcccaugccuguaa

SEQ ID NO: 39805 - RNA, 20 nt, Artificial Sequence
  spacer sequence TTCN PAM
aguacuuugggaggccgagg

SEQ ID NO: 39806 - RNA, 20 nt, Artificial Sequence
  spacer sequence TTCN PAM
caggcuggucucaaacuccu

SEQ ID NO: 39807 - RNA, 20 nt, Artificial Sequence
  spacer sequence TTCN PAM
uuuuuagaggugggucucuc

SEQ ID NO: 39808 - RNA, 20 nt, Artificial Sequence
  spacer sequence TTCN PAM
uucuuuuuuagagguggguc

SEQ ID NO: 39809 - RNA, 20 nt, Artificial Sequence
  spacer sequence TTCN PAM
cucucuuucuuucuuuuuua

SEQ ID NO: 39810 - RNA, 20 nt, Artificial Sequence
  spacer sequence TTCN PAM
cuuucucucucuuucuuucu

SEQ ID NO: 39811 - RNA, 20 nt, Artificial Sequence
  spacer sequence TTCN PAM
cucuuucucuuucucucucu

SEQ ID NO: 39812 - RNA, 20 nt, Artificial Sequence
  spacer sequence TTCN PAM
uucucucuuucucuuucucu

SEQ ID NO: 39813 - RNA, 20 nt, Artificial Sequence
  spacer sequence TTCN PAM
guuuuuuuuuuuuucuuucu

SEQ ID NO: 39814 - RNA, 20 nt, Artificial Sequence
  spacer sequence TTCN PAM
cccaaagcacauuucuguuu

SEQ ID NO: 39815 - RNA, 20 nt, Artificial Sequence
  spacer sequence TTCN PAM
cugccuuagaccuugacauu

SEQ ID NO: 39816 - RNA, 20 nt, Artificial Sequence
  spacer sequence TTCN PAM
caucuucucugccuuagacc

SEQ ID NO: 39817 - RNA, 20 nt, Artificial Sequence
  spacer sequence TTCN PAM
ucucagggcuucucagucug

SEQ ID NO: 39818 - RNA, 20 nt, Artificial Sequence
  spacer sequence TTCN PAM
cagucugagugguuacucca

SEQ ID NO: 39819 - RNA, 20 nt, Artificial Sequence
  spacer sequence TTCN PAM
gcuggucgaucacaccgcuc

SEQ ID NO: 39820 - RNA, 20 nt, Artificial Sequence
  spacer sequence TTCN PAM
ucuucuccgugcccagcaca

SEQ ID NO: 39821 - RNA, 20 nt, Artificial Sequence
  spacer sequence TTCN PAM
ucuccgugcccagcacagcc

SEQ ID NO: 39822 - RNA, 20 nt, Artificial Sequence
  spacer sequence TTCN PAM
ccgugcccagcacagccuau

SEQ ID NO: 39823 - RNA, 20 nt, Artificial Sequence
  spacer sequence TTCN PAM
auugaugccaauaaagaggu

SEQ ID NO: 39824 - RNA, 20 nt, Artificial Sequence
  spacer sequence TTCN PAM
cugaucagguggggcaccac

SEQ ID NO: 39825 - RNA, 20 nt, Artificial Sequence
  spacer sequence TTCN PAM
gcucaagggugggagacgga

SEQ ID NO: 39826 - RNA, 20 nt, Artificial Sequence
  spacer sequence TTCN PAM
agauccggcucaccuccugc

SEQ ID NO: 39827 - RNA, 20 nt, Artificial Sequence
  spacer sequence TTCN PAM
uuaucuucccccacuucugc

SEQ ID NO: 39828 - RNA, 20 nt, Artificial Sequence
  spacer sequence TTCN PAM
cccacuucugcuugggccgg

SEQ ID NO: 39829 - RNA, 20 nt, Artificial Sequence
  spacer sequence TTCN PAM
gcuugggccgggggcucauu

SEQ ID NO: 39830 - RNA, 20 nt, Artificial Sequence
  spacer sequence TTCN PAM
gcaccaugucaaugagcccc

SEQ ID NO: 39831 - RNA, 20 nt, Artificial Sequence
  spacer sequence TTCN PAM
cacccaagcgcucaaaggca

SEQ ID NO: 39832 - RNA, 20 nt, Artificial Sequence
  spacer sequence TTCN PAM
ugucagguggggccauggcu

SEQ ID NO: 39833 - RNA, 20 nt, Artificial Sequence
  spacer sequence TTCN PAM
ccacucuguauaauuaacuc

SEQ ID NO: 39834 - RNA, 20 nt, Artificial Sequence
  spacer sequence TTCN PAM
uagguggcccuaagguuggg

SEQ ID NO: 39835 - RNA, 20 nt, Artificial Sequence
  spacer sequence TTCN PAM
uguaccuccaacuuggccca

SEQ ID NO: 39836 - RNA, 20 nt, Artificial Sequence
  spacer sequence TTCN PAM
uagauuacaucacaagaggc

SEQ ID NO: 39837 - RNA, 20 nt, Artificial Sequence
  spacer sequence TTCN PAM
guuuucuaugccaauuagac

SEQ ID NO: 39838 - RNA, 20 nt, Artificial Sequence
  spacer sequence TTCN PAM
augccaauuagacuccagcu

SEQ ID NO: 39839 - RNA, 20 nt, Artificial Sequence
  spacer sequence TTCN PAM
uuucccuuaagaauccagag

SEQ ID NO: 39840 - RNA, 20 nt, Artificial Sequence
  spacer sequence TTCN PAM
cuuaagaauccagagugaca

SEQ ID NO: 39841 - RNA, 20 nt, Artificial Sequence
  spacer sequence TTCN PAM
uaagggaaaggaacacaaau

SEQ ID NO: 39842 - RNA, 20 nt, Artificial Sequence
  spacer sequence TTCN PAM
ccauccaugucacucuggau

SEQ ID NO: 39843 - RNA, 20 nt, Artificial Sequence
  spacer sequence TTCN PAM
ggcccuuucuccauccaugu

SEQ ID NO: 39844 - RNA, 20 nt, Artificial Sequence
  spacer sequence TTCN PAM
auauccacaggagacaggca

SEQ ID NO: 39845 - RNA, 20 nt, Artificial Sequence
  spacer sequence TTCN PAM
caagaucugauggucuaaaa

SEQ ID NO: 39846 - RNA, 20 nt, Artificial Sequence
  spacer sequence TTCN PAM
caugauaguacguggguuuc

SEQ ID NO: 39847 - RNA, 20 nt, Artificial Sequence
  spacer sequence TTCN PAM
ugggcuguucucaugauagu

SEQ ID NO: 39848 - RNA, 20 nt, Artificial Sequence
  spacer sequence TTCN PAM
accauccuccaccagcuccc

SEQ ID NO: 39849 - RNA, 20 nt, Artificial Sequence
  spacer sequence TTCN PAM
cacguguugugggagggagc

SEQ ID NO: 39850 - RNA, 20 nt, Artificial Sequence
  spacer sequence TTCN PAM
guuucuccccuugucucucu

SEQ ID NO: 39851 - RNA, 20 nt, Artificial Sequence
  spacer sequence TTCN PAM
ccccuugucucucucuccuc

SEQ ID NO: 39852 - RNA, 20 nt, Artificial Sequence
  spacer sequence TTCN PAM
uaucuaacuaccuaacuuuu

SEQ ID NO: 39853 - RNA, 20 nt, Artificial Sequence
  spacer sequence TTCN PAM
uucucaccuugaggccagga

SEQ ID NO: 39854 - RNA, 20 nt, Artificial Sequence
  spacer sequence TTCN PAM
caccuugaggccaggaguuu

SEQ ID NO: 39855 - RNA, 20 nt, Artificial Sequence
  spacer sequence TTCN PAM
uauguugccuaggcuugucu

SEQ ID NO: 39856 - RNA, 20 nt, Artificial Sequence
  spacer sequence TTCN PAM
uuuuuguuguuguuguuguu

SEQ ID NO: 39857 - RNA, 20 nt, Artificial Sequence
  spacer sequence TTCN PAM
ccugccuuggccucccgagu

SEQ ID NO: 39858 - RNA, 20 nt, Artificial Sequence
  spacer sequence TTCN PAM
ccauguuagccaggcugguc

SEQ ID NO: 39859 - RNA, 20 nt, Artificial Sequence
  spacer sequence TTCN PAM
agaccagccuggcuaacaug

SEQ ID NO: 39860 - RNA, 20 nt, Artificial Sequence
  spacer sequence TTCN PAM
gaccucagaucaucugcuug

SEQ ID NO: 39861 - RNA, 20 nt, Artificial Sequence
  spacer sequence TTCN PAM
gaagugcugagauuacaggc

SEQ ID NO: 39862 - RNA, 20 nt, Artificial Sequence
  spacer sequence TTCN PAM
gaaggccgaggcaagcagau

SEQ ID NO: 39863 - RNA, 20 nt, Artificial Sequence
  spacer sequence TTCN PAM
uggccgggugcgguggcuca

SEQ ID NO: 39864 - RNA, 20 nt, Artificial Sequence
  spacer sequence TTCN PAM
acaaaaaaauuuaaaaauua

SEQ ID NO: 39865 - RNA, 20 nt, Artificial Sequence
  spacer sequence TTCN PAM
caccucagccucccgaguaa

SEQ ID NO: 39866 - RNA, 20 nt, Artificial Sequence
  spacer sequence TTCN PAM
guuuguuuggagacaguguc

SEQ ID NO: 39867 - RNA, 20 nt, Artificial Sequence
  spacer sequence TTCN PAM
gguuuuuguuuguuuucugu

SEQ ID NO: 39868 - RNA, 20 nt, Artificial Sequence
  spacer sequence TTCN PAM
ucccucuccucuucugguuu

SEQ ID NO: 39869 - RNA, 20 nt, Artificial Sequence
  spacer sequence TTCN PAM
uggcagggaaggggcaggag

SEQ ID NO: 39870 - RNA, 20 nt, Artificial Sequence
  spacer sequence TTCN PAM
cugccaggaacacuccaggu

SEQ ID NO: 39871 - RNA, 20 nt, Artificial Sequence
  spacer sequence TTCN PAM
ugggaccugccccaccuugc

SEQ ID NO: 39872 - RNA, 20 nt, Artificial Sequence
  spacer sequence TTCN PAM
caacacagcagcuccagaca

SEQ ID NO: 39873 - RNA, 20 nt, Artificial Sequence
  spacer sequence TTCN PAM
gcccuggcucccaacaguca

SEQ ID NO: 39874 - RNA, 20 nt, Artificial Sequence
  spacer sequence TTCN PAM
cacucccucccuggucucuu

SEQ ID NO: 39875 - RNA, 20 nt, Artificial Sequence
  spacer sequence TTCN PAM
cgcccuguggcacccucccc

SEQ ID NO: 39876 - RNA, 20 nt, Artificial Sequence
  spacer sequence TTCN PAM
cccucuuuuucucgcccugu

SEQ ID NO: 39877 - RNA, 20 nt, Artificial Sequence
  spacer sequence TTCN PAM
cuuucucccucuuuuucucg

SEQ ID NO: 39878 - RNA, 20 nt, Artificial Sequence
  spacer sequence TTCN PAM
cugcucacagggacagcuuu

SEQ ID NO: 39879 - RNA, 20 nt, Artificial Sequence
  spacer sequence TTCN PAM
gggcaaggucugggggaugg

SEQ ID NO: 39880 - RNA, 20 nt, Artificial Sequence
  spacer sequence TTCN PAM
ccacguggccacccugccug

SEQ ID NO: 39881 - RNA, 20 nt, Artificial Sequence
  spacer sequence TTCN PAM
gaagcccggagaaggagggg

SEQ ID NO: 39882 - RNA, 20 nt, Artificial Sequence
  spacer sequence TTCN PAM
gaacaccagcagggcuggac

SEQ ID NO: 39883 - RNA, 20 nt, Artificial Sequence
  spacer sequence TTCN PAM
ccgggcuucugaacaccagc

SEQ ID NO: 39884 - RNA, 20 nt, Artificial Sequence
  spacer sequence TTCN PAM
ugucccuguuuuacaaggga

SEQ ID NO: 39885 - RNA, 20 nt, Artificial Sequence
  spacer sequence TTCN PAM
uaggguaauuggcuaauaau

SEQ ID NO: 39886 - RNA, 20 nt, Artificial Sequence
  spacer sequence TTCN PAM
cuaaauaggauaaagggcag

SEQ ID NO: 39887 - RNA, 20 nt, Artificial Sequence
  spacer sequence TTCN PAM
aggagaccuggcaaccuccu

SEQ ID NO: 39888 - RNA, 20 nt, Artificial Sequence
  spacer sequence TTCN PAM
ucaccagguuuccaggagac

SEQ ID NO: 39889 - RNA, 20 nt, Artificial Sequence
  spacer sequence TTCN PAM
cucugccccuagacaccuuc

SEQ ID NO: 39890 - RNA, 20 nt, Artificial Sequence
  spacer sequence TTCN PAM
ccuagcagacauugcuugug

SEQ ID NO: 39891 - RNA, 20 nt, Artificial Sequence
  spacer sequence TTCN PAM
cugagucacaagcaaugucu

SEQ ID NO: 39892 - RNA, 20 nt, Artificial Sequence
  spacer sequence TTCN PAM
ucuccucccucaaauccguc

SEQ ID NO: 39893 - RNA, 20 nt, Artificial Sequence
  spacer sequence TTCN PAM
ugugucauaaaauccacucc

SEQ ID NO: 39894 - RNA, 20 nt, Artificial Sequence
  spacer sequence TTCN PAM
gggccucuggcuuugcuguu

SEQ ID NO: 39895 - RNA, 20 nt, Artificial Sequence
  spacer sequence TTCN PAM
ccugcccuguguguggauca

SEQ ID NO: 39896 - RNA, 20 nt, Artificial Sequence
  spacer sequence TTCN PAM
auagcggcugcaccaucuua

SEQ ID NO: 39897 - RNA, 20 nt, Artificial Sequence
  spacer sequence TTCN PAM
agaccagccuggccaacaua

SEQ ID NO: 39898 - RNA, 20 nt, Artificial Sequence
  spacer sequence TTCN PAM
cuauguuggccaggcugguc

SEQ ID NO: 39899 - RNA, 20 nt, Artificial Sequence
  spacer sequence TTCN PAM
guagagacgggguuucacua

SEQ ID NO: 39900 - RNA, 20 nt, Artificial Sequence
  spacer sequence TTCN PAM
ccucccucggccucccaagu

SEQ ID NO: 39901 - RNA, 20 nt, Artificial Sequence
  spacer sequence TTCN PAM
agcgauucuccucccucggc

SEQ ID NO: 39902 - RNA, 20 nt, Artificial Sequence
  spacer sequence TTCN PAM
cucuuuuugcccaagcugga

SEQ ID NO: 39903 - RNA, 20 nt, Artificial Sequence
  spacer sequence TTCN PAM
acuccuaggcauacacccaa

SEQ ID NO: 39904 - RNA, 20 nt, Artificial Sequence
  spacer sequence TTCN PAM
cuuggguguaugccuaggag

SEQ ID NO: 39905 - RNA, 20 nt, Artificial Sequence
  spacer sequence TTCN PAM
uuucucuuggguguaugccu

SEQ ID NO: 39906 - RNA, 20 nt, Artificial Sequence
  spacer sequence TTCN PAM
cuuuuugaguuuguaaagcc

SEQ ID NO: 39907 - RNA, 20 nt, Artificial Sequence
  spacer sequence TTCN PAM
ggaggcugagaaaggagaau

SEQ ID NO: 39908 - RNA, 20 nt, Artificial Sequence
  spacer sequence TTCN PAM
cagccuccugaauagcugag

SEQ ID NO: 39909 - RNA, 20 nt, Artificial Sequence
  spacer sequence TTCN PAM
ccuuucucagccuccugaau

SEQ ID NO: 39910 - RNA, 20 nt, Artificial Sequence
  spacer sequence TTCN PAM
agcaauucuccuuucucagc

SEQ ID NO: 39911 - RNA, 20 nt, Artificial Sequence
  spacer sequence TTCN PAM
ucuguggauggacaucuggg

SEQ ID NO: 39912 - RNA, 20 nt, Artificial Sequence
  spacer sequence TTCN PAM
aguguguggagggaucacau

SEQ ID NO: 39913 - RNA, 20 nt, Artificial Sequence
  spacer sequence TTCN PAM
gagccaugaaaaggaaugau

SEQ ID NO: 39914 - RNA, 20 nt, Artificial Sequence
  spacer sequence TTCN PAM
uggcucagaaauauuccagu

SEQ ID NO: 39915 - RNA, 20 nt, Artificial Sequence
  spacer sequence TTCN PAM
uuuucauggcucagaaauau

SEQ ID NO: 39916 - RNA, 20 nt, Artificial Sequence
  spacer sequence TTCN PAM
cucacugagcaugagguccu

SEQ ID NO: 39917 - RNA, 20 nt, Artificial Sequence
  spacer sequence TTCN PAM
uuugugccuggcuucucuca

SEQ ID NO: 39918 - RNA, 20 nt, Artificial Sequence
  spacer sequence TTCN PAM
augaaauguccaggacaggc

SEQ ID NO: 39919 - RNA, 20 nt, Artificial Sequence
  spacer sequence TTCN PAM
uggaaaugggaucacacacu

SEQ ID NO: 39920 - RNA, 20 nt, Artificial Sequence
  spacer sequence TTCN PAM
cucuccaucuccuccccuag

SEQ ID NO: 39921 - RNA, 20 nt, Artificial Sequence
  spacer sequence TTCN PAM
uuuggggacaaugaaaauac

SEQ ID NO: 39922 - RNA, 20 nt, Artificial Sequence
  spacer sequence TTCN PAM
uuguccccaaaggaagccca

SEQ ID NO: 39923 - RNA, 20 nt, Artificial Sequence
  spacer sequence TTCN PAM
ccauguuggucaggcugguc

SEQ ID NO: 39924 - RNA, 20 nt, Artificial Sequence
  spacer sequence TTCN PAM
ccugccucagccucccaagu

SEQ ID NO: 39925 - RNA, 20 nt, Artificial Sequence
  spacer sequence TTCN PAM
agcgauucuccugccucagc

SEQ ID NO: 39926 - RNA, 20 nt, Artificial Sequence
  spacer sequence TTCN PAM
cucuuguugcccaggcugga

SEQ ID NO: 39927 - RNA, 20 nt, Artificial Sequence
  spacer sequence TTCN PAM
gucucaagagaaaaaaaaaa

SEQ ID NO: 39928 - RNA, 20 nt, Artificial Sequence
  spacer sequence TTCN PAM
cuugagacagaauuucgcuc

SEQ ID NO: 39929 - RNA, 20 nt, Artificial Sequence
  spacer sequence TTCN PAM
ggaacuagauagauagaggu

SEQ ID NO: 39930 - RNA, 20 nt, Artificial Sequence
  spacer sequence TTCN PAM
agaauuuuuuuuuucucuug

SEQ ID NO: 39931 - RNA, 20 nt, Artificial Sequence
  spacer sequence TTCN PAM
guguuuuuaggacguguaca

SEQ ID NO: 39932 - RNA, 20 nt, Artificial Sequence
  spacer sequence TTCN PAM
aaguguacaauucaguguuu

SEQ ID NO: 39933 - RNA, 20 nt, Artificial Sequence
  spacer sequence TTCN PAM
acauuuuaacacuucaaagu

SEQ ID NO: 39934 - RNA, 20 nt, Artificial Sequence
  spacer sequence TTCN PAM
uauguauuuuguuugaauuu

SEQ ID NO: 39935 - RNA, 20 nt, Artificial Sequence
  spacer sequence TTCN PAM
aacaaaauacauaugaaauu

SEQ ID NO: 39936 - RNA, 20 nt, Artificial Sequence
  spacer sequence TTCN PAM
aaaacuuuuuuuuuuuuuga

SEQ ID NO: 39937 - RNA, 20 nt, Artificial Sequence
  spacer sequence TTCN PAM
ugucacugcacuccagccug

SEQ ID NO: 39938 - RNA, 20 nt, Artificial Sequence
  spacer sequence TTCN PAM
agcaauucuccugccucagc

SEQ ID NO: 39939 - RNA, 20 nt, Artificial Sequence
  spacer sequence TTCN PAM
ccugccucagccuccugagu

SEQ ID NO: 39940 - RNA, 20 nt, Artificial Sequence
  spacer sequence TTCN PAM
ccauguuggucaggcugguc

SEQ ID NO: 39941 - RNA, 20 nt, Artificial Sequence
  spacer sequence TTCN PAM
agaccagccugaccaacaug

SEQ ID NO: 39942 - RNA, 20 nt, Artificial Sequence
  spacer sequence TTCN PAM
cuauguuggccaggcuggcc

SEQ ID NO: 39943 - RNA, 20 nt, Artificial Sequence
  spacer sequence TTCN PAM
gccucccaaagugcugggau

SEQ ID NO: 39944 - RNA, 20 nt, Artificial Sequence
  spacer sequence TTCN PAM
caccauucuccugccucagc

SEQ ID NO: 39945 - RNA, 20 nt, Artificial Sequence
  spacer sequence TTCN PAM
ccugccucagccucccgagu

SEQ ID NO: 39946 - RNA, 20 nt, Artificial Sequence
  spacer sequence TTCN PAM
ccguguuagccaggaugguc

SEQ ID NO: 39947 - RNA, 20 nt, Artificial Sequence
  spacer sequence TTCN PAM
uuuuuaagaucuuuuuggcc

SEQ ID NO: 39948 - RNA, 20 nt, Artificial Sequence
  spacer sequence TTCN PAM
uuucuuuuuuaagaucuuuu

SEQ ID NO: 39949 - RNA, 20 nt, Artificial Sequence
  spacer sequence TTCN PAM
uggagccaggggcugcucua

SEQ ID NO: 39950 - RNA, 20 nt, Artificial Sequence
  spacer sequence TTCN PAM
agagcagccccuggcuccag

SEQ ID NO: 39951 - RNA, 20 nt, Artificial Sequence
  spacer sequence TTCN PAM
ugcagggacacucaagaacu

SEQ ID NO: 39952 - RNA, 20 nt, Artificial Sequence
  spacer sequence TTCN PAM
ugagugucccugcaggaagc

SEQ ID NO: 39953 - RNA, 20 nt, Artificial Sequence
  spacer sequence TTCN PAM
gcccucacagggcuggagcc

SEQ ID NO: 39954 - RNA, 20 nt, Artificial Sequence
  spacer sequence TTCN PAM
ccguucgugaaauggggaca

SEQ ID NO: 39955 - RNA, 20 nt, Artificial Sequence
  spacer sequence TTCN PAM
ugaaauggggacacucuggg

SEQ ID NO: 39956 - RNA, 20 nt, Artificial Sequence
  spacer sequence TTCN PAM
cgaacggggaaauggagucu

SEQ ID NO: 39957 - RNA, 20 nt, Artificial Sequence
  spacer sequence TTCN PAM
cagaguguccccauuucacg

SEQ ID NO: 39958 - RNA, 20 nt, Artificial Sequence
  spacer sequence TTCN PAM
cagcuuuucccagagugucc

SEQ ID NO: 39959 - RNA, 20 nt, Artificial Sequence
  spacer sequence TTCN PAM
cagauccgaggucgcgaccc

SEQ ID NO: 39960 - RNA, 20 nt, Artificial Sequence
  spacer sequence TTCN PAM
ccacuucugacuuuaucaca

SEQ ID NO: 39961 - RNA, 20 nt, Artificial Sequence
  spacer sequence TTCN PAM
gacuuuaucacaauuggcag

SEQ ID NO: 39962 - RNA, 20 nt, Artificial Sequence
  spacer sequence TTCN PAM
ugccaauugugauaaaguca

SEQ ID NO: 39963 - RNA, 20 nt, Artificial Sequence
  spacer sequence TTCN PAM
ugacuuccugccaauuguga

SEQ ID NO: 39964 - RNA, 20 nt, Artificial Sequence
  spacer sequence TTCN PAM
ggcaacccugaaauaaacuc

SEQ ID NO: 39965 - RNA, 20 nt, Artificial Sequence
  spacer sequence TTCN PAM
ggguugccagaaaaacagcu

SEQ ID NO: 39966 - RNA, 20 nt, Artificial Sequence
  spacer sequence TTCN PAM
gugcacauguuugcaacaaa

SEQ ID NO: 39967 - RNA, 20 nt, Artificial Sequence
  spacer sequence TTCN PAM
uuaaguuuguugcaaacaug

SEQ ID NO: 39968 - RNA, 20 nt, Artificial Sequence
  spacer sequence TTCN PAM
caauuuugccgguguuguuu

SEQ ID NO: 39969 - RNA, 20 nt, Artificial Sequence
  spacer sequence TTCN PAM
caagggcaagaacagaguca

SEQ ID NO: 39970 - RNA, 20 nt, Artificial Sequence
  spacer sequence TTCN PAM
ugcccuugcgaaggcucagc

SEQ ID NO: 39971 - RNA, 20 nt, Artificial Sequence
  spacer sequence TTCN PAM
ucccgcccuggcagugccgg

SEQ ID NO: 39972 - RNA, 20 nt, Artificial Sequence
  spacer sequence TTCN PAM
ugagaagucagacaauggga

SEQ ID NO: 39973 - RNA, 20 nt, Artificial Sequence
  spacer sequence TTCN PAM
caggaaacccccccauuucc

SEQ ID NO: 39974 - RNA, 20 nt, Artificial Sequence
  spacer sequence TTCN PAM
uggagucaacucccauuguc

SEQ ID NO: 39975 - RNA, 20 nt, Artificial Sequence
  spacer sequence TTCN PAM
cauggcuuugcucccgccca

SEQ ID NO: 39976 - RNA, 20 nt, Artificial Sequence
  spacer sequence TTCN PAM
gccagcccugcucagggauc

SEQ ID NO: 39977 - RNA, 20 nt, Artificial Sequence
  spacer sequence TTCN PAM
cugccucugccaccaaacca

SEQ ID NO: 39978 - RNA, 20 nt, Artificial Sequence
  spacer sequence TTCN PAM
gagacagacucagggccggg

SEQ ID NO: 39979 - RNA, 20 nt, Artificial Sequence
  spacer sequence TTCN PAM
ucagagacagacucagggcc

SEQ ID NO: 39980 - RNA, 20 nt, Artificial Sequence
  spacer sequence TTCN PAM
gacccugcacugaguauuuc

SEQ ID NO: 39981 - RNA, 20 nt, Artificial Sequence
  spacer sequence TTCN PAM
agaccagccugaccaacaug

SEQ ID NO: 39982 - RNA, 20 nt, Artificial Sequence
  spacer sequence TTCN PAM
ccauguuggucaggcugguc

SEQ ID NO: 39983 - RNA, 20 nt, Artificial Sequence
  spacer sequence TTCN PAM
ccugccucagucuccugagu

SEQ ID NO: 39984 - RNA, 20 nt, Artificial Sequence
  spacer sequence TTCN PAM
agugauucuccugccucagu

SEQ ID NO: 39985 - RNA, 20 nt, Artificial Sequence
  spacer sequence TTCN PAM
ggguucaagugauucuccug

SEQ ID NO: 39986 - RNA, 20 nt, Artificial Sequence
  spacer sequence TTCN PAM
caaguaugagaugaguguuu

SEQ ID NO: 39987 - RNA, 20 nt, Artificial Sequence
  spacer sequence TTCN PAM
guugccacauguccaagcca

SEQ ID NO: 39988 - RNA, 20 nt, Artificial Sequence
  spacer sequence TTCN PAM
uggcuuggacauguggcaac

SEQ ID NO: 39989 - RNA, 20 nt, Artificial Sequence
  spacer sequence TTCN PAM
cuucguggcuuggacaugug

SEQ ID NO: 39990 - RNA, 20 nt, Artificial Sequence
  spacer sequence TTCN PAM
aacucuguuuuucacuucgu

SEQ ID NO: 39991 - RNA, 20 nt, Artificial Sequence
  spacer sequence TTCN PAM
aacauuacaagguaugggca

SEQ ID NO: 39992 - RNA, 20 nt, Artificial Sequence
  spacer sequence TTCN PAM
uacacuucuaacauuacaag

SEQ ID NO: 39993 - RNA, 20 nt, Artificial Sequence
  spacer sequence TTCN PAM
gagcacauaccgcgcguccc

SEQ ID NO: 39994 - RNA, 20 nt, Artificial Sequence
  spacer sequence TTCN PAM
ugggcucccacccccagggg

SEQ ID NO: 39995 - RNA, 20 nt, Artificial Sequence
  spacer sequence TTCN PAM
caguuaagugguaacugucu

SEQ ID NO: 39996 - RNA, 20 nt, Artificial Sequence
  spacer sequence TTCN PAM
caucacagcuccaucuuaug

SEQ ID NO: 39997 - RNA, 20 nt, Artificial Sequence
  spacer sequence TTCN PAM
uuuacauuaaaaaggcaaau

SEQ ID NO: 39998 - RNA, 20 nt, Artificial Sequence
  spacer sequence TTCN PAM
agaucagccuggccaacaug

SEQ ID NO: 39999 - RNA, 20 nt, Artificial Sequence
  spacer sequence TTCN PAM
ccauguuggccaggcugauc

SEQ ID NO: 40000 - RNA, 20 nt, Artificial Sequence
  spacer sequence TTCN PAM
ccugacucagccuccugagu

SEQ ID NO: 40001 - RNA, 20 nt, Artificial Sequence
  spacer sequence TTCN PAM
agcgauucuccugacucagc

SEQ ID NO: 40002 - RNA, 20 nt, Artificial Sequence
  spacer sequence TTCN PAM
gagacacaguuuuuuugcuc

SEQ ID NO: 40003 - RNA, 20 nt, Artificial Sequence
  spacer sequence TTCN PAM
caaaagugcugggaucacau

SEQ ID NO: 40004 - RNA, 20 nt, Artificial Sequence
  spacer sequence TTCN PAM
gaccucaagugauccuccag

SEQ ID NO: 40005 - RNA, 20 nt, Artificial Sequence
  spacer sequence TTCN PAM
uggcuaauuauuguuuugua

SEQ ID NO: 40006 - RNA, 20 nt, Artificial Sequence
  spacer sequence TTCN PAM
cgaguagcugggacaacagg

SEQ ID NO: 40007 - RNA, 20 nt, Artificial Sequence
  spacer sequence TTCN PAM
cuugagccugggaggucgag

SEQ ID NO: 40008 - RNA, 20 nt, Artificial Sequence
  spacer sequence TTCN PAM
gcgaguuggagaaaccaaac

SEQ ID NO: 40009 - RNA, 20 nt, Artificial Sequence
  spacer sequence TTCN PAM
ccaacucgcagaaaaguguc

SEQ ID NO: 40010 - RNA, 20 nt, Artificial Sequence
  spacer sequence TTCN PAM
cagguugucuggccugcggc

SEQ ID NO: 40011 - RNA, 20 nt, Artificial Sequence
  spacer sequence TTCN PAM
ccgccuucuucccacuccgg

SEQ ID NO: 40012 - RNA, 20 nt, Artificial Sequence
  spacer sequence TTCN PAM
ucccacuccggccucccauu

SEQ ID NO: 40013 - RNA, 20 nt, Artificial Sequence
  spacer sequence TTCN PAM
cacuccggccucccauuggc

SEQ ID NO: 40014 - RNA, 20 nt, Artificial Sequence
  spacer sequence TTCN PAM
cacggccacgcccuccagag

SEQ ID NO: 40015 - RNA, 20 nt, Artificial Sequence
  spacer sequence TTCN PAM
gcgccuccuuucccacggcc

SEQ ID NO: 40016 - RNA, 20 nt, Artificial Sequence
  spacer sequence TTCN PAM
guaggcggcaaaggcggccg

SEQ ID NO: 40017 - RNA, 20 nt, Artificial Sequence
  spacer sequence TTCN PAM
ccacgccggcgagcggaggc

SEQ ID NO: 40018 - RNA, 20 nt, Artificial Sequence
  spacer sequence TTCN PAM
ccgaccccagcccgcgcgcc

SEQ ID NO: 40019 - RNA, 20 nt, Artificial Sequence
  spacer sequence TTCN PAM
ccuuccccgaccccagcccg

SEQ ID NO: 40020 - RNA, 20 nt, Artificial Sequence
  spacer sequence TTCN PAM
acgcgcgcgggucguggucg

SEQ ID NO: 40021 - RNA, 20 nt, Artificial Sequence
  spacer sequence TTCN PAM
ccgaccacgacccgcgcgcg

SEQ ID NO: 40022 - RNA, 20 nt, Artificial Sequence
  spacer sequence TTCN PAM
agcccuccgcgcccccaacc

SEQ ID NO: 40023 - RNA, 20 nt, Artificial Sequence
  spacer sequence TTCN PAM
gccgccgaggggcucgcggc

SEQ ID NO: 40024 - RNA, 20 nt, Artificial Sequence
  spacer sequence TTCN PAM
gccggcgccgcgcccuccug

SEQ ID NO: 40025 - RNA, 20 nt, Artificial Sequence
  spacer sequence TTCN PAM
uccgccggcgccgcgcccuc

SEQ ID NO: 40026 - RNA, 20 nt, Artificial Sequence
  spacer sequence TTCN PAM
uggaucuccggucgcaagcu

SEQ ID NO: 40027 - RNA, 20 nt, Artificial Sequence
  spacer sequence TTCN PAM
aaccccaaaaugugccacau

SEQ ID NO: 40028 - RNA, 20 nt, Artificial Sequence
  spacer sequence TTCN PAM
gguccgguuuuaccggagac

SEQ ID NO: 40029 - RNA, 20 nt, Artificial Sequence
  spacer sequence TTCN PAM
ggucuucagggccgcagggc

SEQ ID NO: 40030 - RNA, 20 nt, Artificial Sequence
  spacer sequence TTCN PAM
gggccgcagggccucggugu

SEQ ID NO: 40031 - RNA, 20 nt, Artificial Sequence
  spacer sequence TTCN PAM
ugccucagggucccgggcuc

SEQ ID NO: 40032 - RNA, 20 nt, Artificial Sequence
  spacer sequence TTCN PAM
uuugccuugcagugcgcguc

SEQ ID NO: 40033 - RNA, 20 nt, Artificial Sequence
  spacer sequence TTCN PAM
gccaaggacaucgacgggca

SEQ ID NO: 40034 - RNA, 20 nt, Artificial Sequence
  spacer sequence TTCN PAM
ucugcgcugacgccgccgau

SEQ ID NO: 40035 - RNA, 20 nt, Artificial Sequence
  spacer sequence TTCN PAM
gcgcugacgccgccgauccu

SEQ ID NO: 40036 - RNA, 20 nt, Artificial Sequence
  spacer sequence TTCN PAM
ugugcaucgucaccaacgug

SEQ ID NO: 40037 - RNA, 20 nt, Artificial Sequence
  spacer sequence TTCN PAM
gucuugccucacugggaggc

SEQ ID NO: 40038 - RNA, 20 nt, Artificial Sequence
  spacer sequence TTCN PAM
cguguaaccaguucgggaag

SEQ ID NO: 40039 - RNA, 20 nt, Artificial Sequence
  spacer sequence TTCN PAM
ggaagcaggugggcugcugc

SEQ ID NO: 40040 - RNA, 20 nt, Artificial Sequence
  spacer sequence TTCN PAM
cgaacugguuacacgggaag

SEQ ID NO: 40041 - RNA, 20 nt, Artificial Sequence
  spacer sequence TTCN PAM
uuacucccuggcuccugugg

SEQ ID NO: 40042 - RNA, 20 nt, Artificial Sequence
  spacer sequence TTCN PAM
ccgcgggcuacaacgucaaa

SEQ ID NO: 40043 - RNA, 20 nt, Artificial Sequence
  spacer sequence TTCN PAM
auauguucagcaagaucugc

SEQ ID NO: 40044 - RNA, 20 nt, Artificial Sequence
  spacer sequence TTCN PAM
gcaagaucugcgugaacggg

SEQ ID NO: 40045 - RNA, 20 nt, Artificial Sequence
  spacer sequence TTCN PAM
cgcagaucuugcugaacaua

SEQ ID NO: 40046 - RNA, 20 nt, Artificial Sequence
  spacer sequence TTCN PAM
acagcgggugggcgucgucc

SEQ ID NO: 40047 - RNA, 20 nt, Artificial Sequence
  spacer sequence TTCN PAM
uccacuuccacagcgggugg

SEQ ID NO: 40048 - RNA, 20 nt, Artificial Sequence
  spacer sequence TTCN PAM
caggaugcccuugcccuugg

SEQ ID NO: 40049 - RNA, 20 nt, Artificial Sequence
  spacer sequence TTCN PAM
gccccagggaggugugagca

SEQ ID NO: 40050 - RNA, 20 nt, Artificial Sequence
  spacer sequence TTCN PAM
ccggcugccuccacagccac

SEQ ID NO: 40051 - RNA, 20 nt, Artificial Sequence
  spacer sequence TTCN PAM
uuuccagugccaucaagugg

SEQ ID NO: 40052 - RNA, 20 nt, Artificial Sequence
  spacer sequence TTCN PAM
agugccaucaaguggaacuu

SEQ ID NO: 40053 - RNA, 20 nt, Artificial Sequence
  spacer sequence TTCN PAM
acuugauggcacuggaaaag

SEQ ID NO: 40054 - RNA, 20 nt, Artificial Sequence
  spacer sequence TTCN PAM
ccaagguaagggggcugugg

SEQ ID NO: 40055 - RNA, 20 nt, Artificial Sequence
  spacer sequence TTCN PAM
ccuggccacagccguggccc

SEQ ID NO: 40056 - RNA, 20 nt, Artificial Sequence
  spacer sequence TTCN PAM
uguccgcugcccaucugggc

SEQ ID NO: 40057 - RNA, 20 nt, Artificial Sequence
  spacer sequence TTCN PAM
ucaucgacaagaacggcugc

SEQ ID NO: 40058 - RNA, 20 nt, Artificial Sequence
  spacer sequence TTCN PAM
ugucgaugaggaacugugga

SEQ ID NO: 40059 - RNA, 20 nt, Artificial Sequence
  spacer sequence TTCN PAM
ccacgcagccguucuugucg

SEQ ID NO: 40060 - RNA, 20 nt, Artificial Sequence
  spacer sequence TTCN PAM
uccccgacaggugauagaga

SEQ ID NO: 40061 - RNA, 20 nt, Artificial Sequence
  spacer sequence TTCN PAM
cuaucaccugucggggagga

SEQ ID NO: 40062 - RNA, 20 nt, Artificial Sequence
  spacer sequence TTCN PAM
agcuccacaaguguguggcc

SEQ ID NO: 40063 - RNA, 20 nt, Artificial Sequence
  spacer sequence TTCN PAM
accggcacucaugacggccu

SEQ ID NO: 40064 - RNA, 20 nt, Artificial Sequence
  spacer sequence TTCN PAM
ggucugccccaccagcaggu

SEQ ID NO: 40065 - RNA, 20 nt, Artificial Sequence
  spacer sequence TTCN PAM
uccggcggggugcacgcugg

SEQ ID NO: 40066 - RNA, 20 nt, Artificial Sequence
  spacer sequence TTCN PAM
cacaagguagccaggggugg

SEQ ID NO: 40067 - RNA, 20 nt, Artificial Sequence
  spacer sequence TTCN PAM
gcguaggggcuuggggggcc

SEQ ID NO: 40068 - RNA, 20 nt, Artificial Sequence
  spacer sequence TTCN PAM
uccaggcucggggggcugug

SEQ ID NO: 40069 - RNA, 20 nt, Artificial Sequence
  spacer sequence TTCN PAM
aaguggcugugcuuccuggc

SEQ ID NO: 40070 - RNA, 20 nt, Artificial Sequence
  spacer sequence TTCN PAM
uggccccgggccuuaacugu

SEQ ID NO: 40071 - RNA, 20 nt, Artificial Sequence
  spacer sequence TTCN PAM
uggccaggggaggccccagu

SEQ ID NO: 40072 - RNA, 20 nt, Artificial Sequence
  spacer sequence TTCN PAM
gcuuccuggccaggggaggc

SEQ ID NO: 40073 - RNA, 20 nt, Artificial Sequence
  spacer sequence TTCN PAM
ucgggccucugcacuucugc

SEQ ID NO: 40074 - RNA, 20 nt, Artificial Sequence
  spacer sequence TTCN PAM
ugggacccgggggcugucug

SEQ ID NO: 40075 - RNA, 20 nt, Artificial Sequence
  spacer sequence TTCN PAM
acagacccccagugggggca

SEQ ID NO: 40076 - RNA, 20 nt, Artificial Sequence
  spacer sequence TTCN PAM
gcccacugccugugcuggcc

SEQ ID NO: 40077 - RNA, 20 nt, Artificial Sequence
  spacer sequence TTCN PAM
cucccugucccacaggcuga

SEQ ID NO: 40078 - RNA, 20 nt, Artificial Sequence
  spacer sequence TTCN PAM
cacggagucugcuccucagc

SEQ ID NO: 40079 - RNA, 20 nt, Artificial Sequence
  spacer sequence TTCN PAM
gauguacauauguaaaggac

SEQ ID NO: 40080 - RNA, 20 nt, Artificial Sequence
  spacer sequence TTCN PAM
auguauuuauagcaaguucu

SEQ ID NO: 40081 - RNA, 20 nt, Artificial Sequence
  spacer sequence TTCN PAM
cugaccccuaaguuauugcc

SEQ ID NO: 40082 - RNA, 20 nt, Artificial Sequence
  spacer sequence TTCN PAM
cccucccccagcccuucccu

SEQ ID NO: 40083 - RNA, 20 nt, Artificial Sequence
  spacer sequence TTCN PAM
ugaguuucuagcucuuggga

SEQ ID NO: 40084 - RNA, 20 nt, Artificial Sequence
  spacer sequence TTCN PAM
agcucuugggaccacccggu

SEQ ID NO: 40085 - RNA, 20 nt, Artificial Sequence
  spacer sequence TTCN PAM
cggauuucaaggguuugggc

SEQ ID NO: 40086 - RNA, 20 nt, Artificial Sequence
  spacer sequence TTCN PAM
aggguuugggcccacugagc

SEQ ID NO: 40087 - RNA, 20 nt, Artificial Sequence
  spacer sequence TTCN PAM
uacuugggaggagaggcaca

SEQ ID NO: 40088 - RNA, 20 nt, Artificial Sequence
  spacer sequence TTCN PAM
gcgcccgacccgggccccca

SEQ ID NO: 40089 - RNA, 20 nt, Artificial Sequence
  spacer sequence TTCN PAM
ccccuaggagcagcgguggg

SEQ ID NO: 40090 - RNA, 20 nt, Artificial Sequence
  spacer sequence TTCN PAM
ccuaaaggcgugucagagag

SEQ ID NO: 40091 - RNA, 20 nt, Artificial Sequence
  spacer sequence TTCN PAM
cccccuaguauggcacccgg

SEQ ID NO: 40092 - RNA, 20 nt, Artificial Sequence
  spacer sequence TTCN PAM
cuggaccccugccuccccag

SEQ ID NO: 40093 - RNA, 20 nt, Artificial Sequence
  spacer sequence TTCN PAM
ggggaggcagggguccaggg

SEQ ID NO: 40094 - RNA, 20 nt, Artificial Sequence
  spacer sequence TTCN PAM
aggggcucagggagguggca

SEQ ID NO: 40095 - RNA, 20 nt, Artificial Sequence
  spacer sequence TTCN PAM
ccccuggggguccuagaccc

SEQ ID NO: 40096 - RNA, 20 nt, Artificial Sequence
  spacer sequence TTCN PAM
ccagcccccaucuacccccu

SEQ ID NO: 40097 - RNA, 20 nt, Artificial Sequence
  spacer sequence TTCN PAM
cugcaguaccuuguucucaa

SEQ ID NO: 40098 - RNA, 20 nt, Artificial Sequence
  spacer sequence TTCN PAM
caaaguuguacuugcugagg

SEQ ID NO: 40099 - RNA, 20 nt, Artificial Sequence
  spacer sequence TTCN PAM
ugggccugucccugguucuc

SEQ ID NO: 40100 - RNA, 20 nt, Artificial Sequence
  spacer sequence TTCN PAM
cagccccacccccaccugcu

SEQ ID NO: 40101 - RNA, 20 nt, Artificial Sequence
  spacer sequence TTCN PAM
ccuccaucguggccaagcgc

SEQ ID NO: 40102 - RNA, 20 nt, Artificial Sequence
  spacer sequence TTCN PAM
ucaucucggagcuggccggg

SEQ ID NO: 40103 - RNA, 20 nt, Artificial Sequence
  spacer sequence TTCN PAM
gugaguccggccccgccccc

SEQ ID NO: 40104 - RNA, 20 nt, Artificial Sequence
  spacer sequence TTCN PAM
ggacacggcggucggcuugg

SEQ ID NO: 40105 - RNA, 20 nt, Artificial Sequence
  spacer sequence TTCN PAM
cccuagcucguggccaucau

SEQ ID NO: 40106 - RNA, 20 nt, Artificial Sequence
  spacer sequence TTCN PAM
uucccccuagcucguggcca

SEQ ID NO: 40107 - RNA, 20 nt, Artificial Sequence
  spacer sequence TTCN PAM
ggagugugugugugccaggu

SEQ ID NO: 40108 - RNA, 20 nt, Artificial Sequence
  spacer sequence TTCN PAM
cgccgcucaugaagcgcugc

SEQ ID NO: 40109 - RNA, 20 nt, Artificial Sequence
  spacer sequence TTCN PAM
ugagcggcgagaaggugcgg

SEQ ID NO: 40110 - RNA, 20 nt, Artificial Sequence
  spacer sequence TTCN PAM
cccugagguucacguggucg

SEQ ID NO: 40111 - RNA, 20 nt, Artificial Sequence
  spacer sequence TTCN PAM
cguggucgauggacagaccc

SEQ ID NO: 40112 - RNA, 20 nt, Artificial Sequence
  spacer sequence TTCN PAM
agucgcgggcagagcagggu

SEQ ID NO: 40113 - RNA, 20 nt, Artificial Sequence
  spacer sequence TTCN PAM
ugccggucaucugcagccga

SEQ ID NO: 40114 - RNA, 20 nt, Artificial Sequence
  spacer sequence TTCN PAM
cuauguccuacaguggucau

SEQ ID NO: 40115 - RNA, 20 nt, Artificial Sequence
  spacer sequence TTCN PAM
cagcacccccaccucccgug

SEQ ID NO: 40116 - RNA, 20 nt, Artificial Sequence
  spacer sequence TTCN PAM
uggcgccggcuggcugauaa

SEQ ID NO: 40117 - RNA, 20 nt, Artificial Sequence
  spacer sequence TTCN PAM
cuucguggcgccggcuggcu

SEQ ID NO: 40118 - RNA, 20 nt, Artificial Sequence
  spacer sequence TTCN PAM
cuuuuucacuucguggcgcc

SEQ ID NO: 40119 - RNA, 20 nt, Artificial Sequence
  spacer sequence TTCN PAM
gcggccuccuacucccugcc

SEQ ID NO: 40120 - RNA, 20 nt, Artificial Sequence
  spacer sequence TTCN PAM
ggcaacgaucuaagcagagg

SEQ ID NO: 40121 - RNA, 20 nt, Artificial Sequence
  spacer sequence TTCN PAM
cgcaggcugugugcagcucu

SEQ ID NO: 40122 - RNA, 20 nt, Artificial Sequence
  spacer sequence TTCN PAM
cggcccagccgccgcacuuu

SEQ ID NO: 40123 - RNA, 20 nt, Artificial Sequence
  spacer sequence TTCN PAM
gccgcuccacccgcuccagg

SEQ ID NO: 40124 - RNA, 20 nt, Artificial Sequence
  spacer sequence TTCN PAM
agggcccaccuaacucaagg

SEQ ID NO: 40125 - RNA, 20 nt, Artificial Sequence
  spacer sequence TTCN PAM
ccgccacccugccgucccuc

SEQ ID NO: 40126 - RNA, 20 nt, Artificial Sequence
  spacer sequence TTCN PAM
gcacuugucucccugagacc

SEQ ID NO: 40127 - RNA, 20 nt, Artificial Sequence
  spacer sequence TTCN PAM
cccaucuguaaagugggcac

SEQ ID NO: 40128 - RNA, 20 nt, Artificial Sequence
  spacer sequence TTCN PAM
agccugaggcucccccggcc

SEQ ID NO: 40129 - RNA, 20 nt, Artificial Sequence
  spacer sequence TTCN PAM
aguccaggcugagcagccac

SEQ ID NO: 40130 - RNA, 20 nt, Artificial Sequence
  spacer sequence TTCN PAM
acuccucccccgagucccug

SEQ ID NO: 40131 - RNA, 20 nt, Artificial Sequence
  spacer sequence TTCN PAM
cugcagggcgaccucgggga

SEQ ID NO: 40132 - RNA, 20 nt, Artificial Sequence
  spacer sequence TTCN PAM
cggauggaccuccccagcuc

SEQ ID NO: 40133 - RNA, 20 nt, Artificial Sequence
  spacer sequence TTCN PAM
ccagggacgcccucuaggga

SEQ ID NO: 40134 - RNA, 20 nt, Artificial Sequence
  spacer sequence TTCN PAM
cuagagggcgucccuggaga

SEQ ID NO: 40135 - RNA, 20 nt, Artificial Sequence
  spacer sequence TTCN PAM
uccuccuccuccuguuccuc

SEQ ID NO: 40136 - RNA, 20 nt, Artificial Sequence
  spacer sequence TTCN PAM
uccuccuccuccuccugugc

SEQ ID NO: 40137 - RNA, 20 nt, Artificial Sequence
  spacer sequence TTCN PAM
uccuccuccuccuguuccuc

SEQ ID NO: 40138 - RNA, 20 nt, Artificial Sequence
  spacer sequence TTCN PAM
acagggugugcccggaggag

SEQ ID NO: 40139 - RNA, 20 nt, Artificial Sequence
  spacer sequence TTCN PAM
gggcaguggagucuugaccu

SEQ ID NO: 40140 - RNA, 20 nt, Artificial Sequence
  spacer sequence TTCN PAM
gcaccgugcugaccaugccu

SEQ ID NO: 40141 - RNA, 20 nt, Artificial Sequence
  spacer sequence TTCN PAM
aggccugcauucggcaccgu

SEQ ID NO: 40142 - RNA, 20 nt, Artificial Sequence
  spacer sequence TTCN PAM
cuuuccaggccugcauucgg

SEQ ID NO: 40143 - RNA, 20 nt, Artificial Sequence
  spacer sequence TTCN PAM
ucccaagccaaccccgaaag

SEQ ID NO: 40144 - RNA, 20 nt, Artificial Sequence
  spacer sequence TTCN PAM
ggguuggcuugggaugaagc

SEQ ID NO: 40145 - RNA, 20 nt, Artificial Sequence
  spacer sequence TTCN PAM
acuuucgggguuggcuuggg

SEQ ID NO: 40146 - RNA, 20 nt, Artificial Sequence
  spacer sequence TTCN PAM
cagggacagcagugcugccu

SEQ ID NO: 40147 - RNA, 20 nt, Artificial Sequence
  spacer sequence TTCN PAM
guucucagggacagcagugc

SEQ ID NO: 40148 - RNA, 20 nt, Artificial Sequence
  spacer sequence TTCN PAM
uucuguucucagggacagca

SEQ ID NO: 40149 - RNA, 20 nt, Artificial Sequence
  spacer sequence TTCN PAM
uggcuugggacucuugcucu

SEQ ID NO: 40150 - RNA, 20 nt, Artificial Sequence
  spacer sequence TTCN PAM
uaaaaggcaucggccucaca

SEQ ID NO: 40151 - RNA, 20 nt, Artificial Sequence
  spacer sequence TTCN PAM
uccuaaaaggcaucggccuc

SEQ ID NO: 40152 - RNA, 20 nt, Artificial Sequence
  spacer sequence TTCN PAM
ccagaugugguuucuuccua

SEQ ID NO: 40153 - RNA, 20 nt, Artificial Sequence
  spacer sequence TTCN PAM
gggaucuggggucugguucc

SEQ ID NO: 40154 - RNA, 20 nt, Artificial Sequence
  spacer sequence TTCN PAM
gaucccuagaucccagaccc

SEQ ID NO: 40155 - RNA, 20 nt, Artificial Sequence
  spacer sequence TTCN PAM
gauccccagaccccagaucc

SEQ ID NO: 40156 - RNA, 20 nt, Artificial Sequence
  spacer sequence TTCN PAM
gauccccagaccccagaucc

SEQ ID NO: 40157 - RNA, 20 nt, Artificial Sequence
  spacer sequence TTCN PAM
gauccccggauccccagauc

SEQ ID NO: 40158 - RNA, 20 nt, Artificial Sequence
  spacer sequence TTCN PAM
agaccccagaucccagaccc

SEQ ID NO: 40159 - RNA, 20 nt, Artificial Sequence
  spacer sequence TTCN PAM
acucccucaccgggccuccc

SEQ ID NO: 40160 - RNA, 20 nt, Artificial Sequence
  spacer sequence TTCN PAM
acgacacaaaugcuuaugcg

SEQ ID NO: 40161 - RNA, 20 nt, Artificial Sequence
  spacer sequence TTCN PAM
gcauaagcauuugugucgug

SEQ ID NO: 40162 - RNA, 20 nt, Artificial Sequence
  spacer sequence TTCN PAM
guggcagccaagcagcuucc

SEQ ID NO: 40163 - RNA, 20 nt, Artificial Sequence
  spacer sequence TTCN PAM
acgcggcuucugcugcugug

SEQ ID NO: 40164 - RNA, 20 nt, Artificial Sequence
  spacer sequence TTCN PAM
gcugcugugaggagcccgcu

SEQ ID NO: 40165 - RNA, 20 nt, Artificial Sequence
  spacer sequence TTCN PAM
gucuuuuggggccagugcgg

SEQ ID NO: 40166 - RNA, 20 nt, Artificial Sequence
  spacer sequence TTCN PAM
ccugagcagacguuaagcua

SEQ ID NO: 40167 - RNA, 20 nt, Artificial Sequence
  spacer sequence TTCN PAM
gguccuuugaaauggaggug

SEQ ID NO: 40168 - RNA, 20 nt, Artificial Sequence
  spacer sequence TTCN PAM
aaggaccggaagucuggagu

SEQ ID NO: 40169 - RNA, 20 nt, Artificial Sequence
  spacer sequence TTCN PAM
auccauguggaggguagucu

SEQ ID NO: 40170 - RNA, 20 nt, Artificial Sequence
  spacer sequence TTCN PAM
uccuccuccaggaccugaug

SEQ ID NO: 40171 - RNA, 20 nt, Artificial Sequence
  spacer sequence TTCN PAM
ggcuucgggcugggcuugag

SEQ ID NO: 40172 - RNA, 20 nt, Artificial Sequence
  spacer sequence TTCN PAM
ggcugggcuugaggacggca

SEQ ID NO: 40173 - RNA, 20 nt, Artificial Sequence
  spacer sequence TTCN PAM
gcgcugacugcuggagcuac

SEQ ID NO: 40174 - RNA, 20 nt, Artificial Sequence
  spacer sequence TTCN PAM
cuccuccaggcguggagcag

SEQ ID NO: 40175 - RNA, 20 nt, Artificial Sequence
  spacer sequence TTCN PAM
ggcccucaguucccuccucc

SEQ ID NO: 40176 - RNA, 20 nt, Artificial Sequence
  spacer sequence TTCN PAM
gugauuucgggcccucaguu

SEQ ID NO: 40177 - RNA, 20 nt, Artificial Sequence
  spacer sequence TTCN PAM
ugcuucugugauuucgggcc

SEQ ID NO: 40178 - RNA, 20 nt, Artificial Sequence
  spacer sequence TTCN PAM
ccagugcggccugauccacc

SEQ ID NO: 40179 - RNA, 20 nt, Artificial Sequence
  spacer sequence TTCN PAM
cucaaacguagcugcugaca

SEQ ID NO: 40180 - RNA, 20 nt, Artificial Sequence
  spacer sequence TTCN PAM
ccgggagaguccgcgccuga

SEQ ID NO: 40181 - RNA, 20 nt, Artificial Sequence
  spacer sequence TTCN PAM
gcucccuguggccacugggc

SEQ ID NO: 40182 - RNA, 20 nt, Artificial Sequence
  spacer sequence TTCN PAM
cugcuuucggggagccacgu

SEQ ID NO: 40183 - RNA, 20 nt, Artificial Sequence
  spacer sequence TTCN PAM
gggagccacgucccccauca

SEQ ID NO: 40184 - RNA, 20 nt, Artificial Sequence
  spacer sequence TTCN PAM
gaccugaccuccccuccucc

SEQ ID NO: 40185 - RNA, 20 nt, Artificial Sequence
  spacer sequence TTCN PAM
ccagcuggaggaggggaggu

SEQ ID NO: 40186 - RNA, 20 nt, Artificial Sequence
  spacer sequence TTCN PAM
ucgggucccggcaucgucac

SEQ ID NO: 40187 - RNA, 20 nt, Artificial Sequence
  spacer sequence TTCN PAM
cuggggcugacccagaccug

SEQ ID NO: 40188 - RNA, 20 nt, Artificial Sequence
  spacer sequence TTCN PAM
gugcacgcggccugaccgca

SEQ ID NO: 40189 - RNA, 20 nt, Artificial Sequence
  spacer sequence TTCN PAM
ggagccuggguuuccgugca

SEQ ID NO: 40190 - RNA, 20 nt, Artificial Sequence
  spacer sequence TTCN PAM
ugcccacaagucuccgcugc

SEQ ID NO: 40191 - RNA, 20 nt, Artificial Sequence
  spacer sequence TTCN PAM
agaucaucugguuuuucaag

SEQ ID NO: 40192 - RNA, 20 nt, Artificial Sequence
  spacer sequence TTCN PAM
agagaagccacaagucugcg

SEQ ID NO: 40193 - RNA, 20 nt, Artificial Sequence
  spacer sequence TTCN PAM
cuugaaaaaccagaugaucu

SEQ ID NO: 40194 - RNA, 20 nt, Artificial Sequence
  spacer sequence TTCN PAM
aaagucggcaagcaauucaa

SEQ ID NO: 40195 - RNA, 20 nt, Artificial Sequence
  spacer sequence TTCN PAM
agcauccacacccccacccc

SEQ ID NO: 40196 - RNA, 20 nt, Artificial Sequence
  spacer sequence TTCN PAM
aggaucugauaaaagccccc

SEQ ID NO: 40197 - RNA, 20 nt, Artificial Sequence
  spacer sequence TTCN PAM
ggggcuuuuaucagauccug

SEQ ID NO: 40198 - RNA, 20 nt, Artificial Sequence
  spacer sequence TTCN PAM
ccaccagggccccagcgccc

SEQ ID NO: 40199 - RNA, 20 nt, Artificial Sequence
  spacer sequence TTCN PAM
ggggcugggccccugcccca

SEQ ID NO: 40200 - RNA, 20 nt, Artificial Sequence
  spacer sequence TTCN PAM
cugguggggcaggggcccag

SEQ ID NO: 40201 - RNA, 20 nt, Artificial Sequence
  spacer sequence TTCN PAM
ggucacagugaugccgcccu

SEQ ID NO: 40202 - RNA, 20 nt, Artificial Sequence
  spacer sequence TTCN PAM
cagggcggcaucacugugac

SEQ ID NO: 40203 - RNA, 20 nt, Artificial Sequence
  spacer sequence TTCN PAM
aaggccacgggggacgguga

SEQ ID NO: 40204 - RNA, 20 nt, Artificial Sequence
  spacer sequence TTCN PAM
aggcacccuggcggcugucu

SEQ ID NO: 40205 - RNA, 20 nt, Artificial Sequence
  spacer sequence TTCN PAM
uggggacagacagccgccag

SEQ ID NO: 40206 - RNA, 20 nt, Artificial Sequence
  spacer sequence TTCN PAM
acccggccccugggcaccgg

SEQ ID NO: 40207 - RNA, 20 nt, Artificial Sequence
  spacer sequence TTCN PAM
ggugcccaggggccgggugg

SEQ ID NO: 40208 - RNA, 20 nt, Artificial Sequence
  spacer sequence TTCN PAM
ucaguuuaccugacaugcaa

SEQ ID NO: 40209 - RNA, 20 nt, Artificial Sequence
  spacer sequence TTCN PAM
uuugcaugucagguaaacug

SEQ ID NO: 40210 - RNA, 20 nt, Artificial Sequence
  spacer sequence TTCN PAM
ccgugacccucccuggcugc

SEQ ID NO: 40211 - RNA, 20 nt, Artificial Sequence
  spacer sequence TTCN PAM
agaaacguuuacugcccgcc

SEQ ID NO: 40212 - RNA, 20 nt, Artificial Sequence
  spacer sequence TTCN PAM
ggaacugacucacuugcugg

SEQ ID NO: 40213 - RNA, 20 nt, Artificial Sequence
  spacer sequence TTCN PAM
ggccuggcgggcaguaaacg

SEQ ID NO: 40214 - RNA, 20 nt, Artificial Sequence
  spacer sequence TTCN PAM
ugggagucucugccgcugug

SEQ ID NO: 40215 - RNA, 20 nt, Artificial Sequence
  spacer sequence TTCN PAM
ggaaccuggcgcacaucacu

SEQ ID NO: 40216 - RNA, 20 nt, Artificial Sequence
  spacer sequence TTCN PAM
ggaaggcggcucacucgcgu

SEQ ID NO: 40217 - RNA, 20 nt, Artificial Sequence
  spacer sequence TTCN PAM
aaacgcagcggggccuggaa

SEQ ID NO: 40218 - RNA, 20 nt, Artificial Sequence
  spacer sequence TTCN PAM
aggccccgcugcguuuugaa

SEQ ID NO: 40219 - RNA, 20 nt, Artificial Sequence
  spacer sequence TTCN PAM
guuucacuuggacgcuuguu

SEQ ID NO: 40220 - RNA, 20 nt, Artificial Sequence
  spacer sequence TTCN PAM
cuuggacgcuuguucuugcu

SEQ ID NO: 40221 - RNA, 20 nt, Artificial Sequence
  spacer sequence TTCN PAM
ugcuggggauggaggucaau

SEQ ID NO: 40222 - RNA, 20 nt, Artificial Sequence
  spacer sequence TTCN PAM
cggagccuugugauugaccu

SEQ ID NO: 40223 - RNA, 20 nt, Artificial Sequence
  spacer sequence TTCN PAM
ccugggccucuugcccugga

SEQ ID NO: 40224 - RNA, 20 nt, Artificial Sequence
  spacer sequence TTCN PAM
gggccacgcugccaugcuga

SEQ ID NO: 40225 - RNA, 20 nt, Artificial Sequence
  spacer sequence TTCN PAM
aguagaaugcagcauucccu

SEQ ID NO: 40226 - RNA, 20 nt, Artificial Sequence
  spacer sequence TTCN PAM
acucgaaggggcccuacggg

SEQ ID NO: 40227 - RNA, 20 nt, Artificial Sequence
  spacer sequence TTCN PAM
cugccccuccgaagcaguga

SEQ ID NO: 40228 - RNA, 20 nt, Artificial Sequence
  spacer sequence TTCN PAM
gaggggcagggaaugcugca

SEQ ID NO: 40229 - RNA, 20 nt, Artificial Sequence
  spacer sequence TTCN PAM
ggggcagagcugggccuggg

SEQ ID NO: 40230 - RNA, 20 nt, Artificial Sequence
  spacer sequence TTCN PAM
cggggacaccgugcucaacc

SEQ ID NO: 40231 - RNA, 20 nt, Artificial Sequence
  spacer sequence TTCN PAM
gaaggacagggaggucuuac

SEQ ID NO: 40232 - RNA, 20 nt, Artificial Sequence
  spacer sequence TTCN PAM
gaauccccaguugucaccac

SEQ ID NO: 40233 - RNA, 20 nt, Artificial Sequence
  spacer sequence TTCN PAM
guuaaacacuuuuauuuucc

SEQ ID NO: 40234 - RNA, 20 nt, Artificial Sequence
  spacer sequence TTCN PAM
cugagauacaauccacacca

SEQ ID NO: 40235 - RNA, 20 nt, Artificial Sequence
  spacer sequence TTCN PAM
acguauucuaaggcagacca

SEQ ID NO: 40236 - RNA, 20 nt, Artificial Sequence
  spacer sequence TTCN PAM
aaggcagaccaccacagcuu

SEQ ID NO: 40237 - RNA, 20 nt, Artificial Sequence
  spacer sequence TTCN PAM
aauuccaaaacauuccgcuc

SEQ ID NO: 40238 - RNA, 20 nt, Artificial Sequence
  spacer sequence TTCN PAM
aaaacauuccgcucccccaa

SEQ ID NO: 40239 - RNA, 20 nt, Artificial Sequence
  spacer sequence TTCN PAM
gcucccccaaaacacagccg

SEQ ID NO: 40240 - RNA, 20 nt, Artificial Sequence
  spacer sequence TTCN PAM
cuucuguggacuggccugcu

SEQ ID NO: 40241 - RNA, 20 nt, Artificial Sequence
  spacer sequence TTCN PAM
guggacuggccugcucugga

SEQ ID NO: 40242 - RNA, 20 nt, Artificial Sequence
  spacer sequence TTCN PAM
ugugacgugugcagagcagg

SEQ ID NO: 40243 - RNA, 20 nt, Artificial Sequence
  spacer sequence TTCN PAM
gaugcgugggccccaucagc

SEQ ID NO: 40244 - RNA, 20 nt, Artificial Sequence
  spacer sequence TTCN PAM
ggccaagacggggauuucgg

SEQ ID NO: 40245 - RNA, 20 nt, Artificial Sequence
  spacer sequence TTCN PAM
cccgcagggcugagcccucu

SEQ ID NO: 40246 - RNA, 20 nt, Artificial Sequence
  spacer sequence TTCN PAM
ucccagcccgagggugcagg

SEQ ID NO: 40247 - RNA, 20 nt, Artificial Sequence
  spacer sequence TTCN PAM
cguccuggccugcccgcugu

SEQ ID NO: 40248 - RNA, 20 nt, Artificial Sequence
  spacer sequence TTCN PAM
acccggcagcuggacacacc

SEQ ID NO: 40249 - RNA, 20 nt, Artificial Sequence
  spacer sequence TTCN PAM
acagccgagggcuguguggu

SEQ ID NO: 40250 - RNA, 20 nt, Artificial Sequence
  spacer sequence TTCN PAM
aggccugcccgcaacaaauc

SEQ ID NO: 40251 - RNA, 20 nt, Artificial Sequence
  spacer sequence TTCN PAM
caugcaccccugcuugugca

SEQ ID NO: 40252 - RNA, 20 nt, Artificial Sequence
  spacer sequence TTCN PAM
ugagucgguuaugugugucu

SEQ ID NO: 40253 - RNA, 20 nt, Artificial Sequence
  spacer sequence TTCN PAM
uacgcguguguuuuaugggu

SEQ ID NO: 40254 - RNA, 20 nt, Artificial Sequence
  spacer sequence TTCN PAM
cacacacacaacgcacccac

SEQ ID NO: 40255 - RNA, 20 nt, Artificial Sequence
  spacer sequence TTCN PAM
guguguguguuguacggaug

SEQ ID NO: 40256 - RNA, 20 nt, Artificial Sequence
  spacer sequence TTCN PAM
gugugugcgucguacggacg

SEQ ID NO: 40257 - RNA, 20 nt, Artificial Sequence
  spacer sequence TTCN PAM
uugugugcauuguacguacg

SEQ ID NO: 40258 - RNA, 20 nt, Artificial Sequence
  spacer sequence TTCN PAM
cagagcugaucccacccccc

SEQ ID NO: 40259 - RNA, 20 nt, Artificial Sequence
  spacer sequence TTCN PAM
gucgacacagucgccucuuu

SEQ ID NO: 40260 - RNA, 20 nt, Artificial Sequence
  spacer sequence TTCN PAM
gggcagagcucacucuggcg

SEQ ID NO: 40261 - RNA, 20 nt, Artificial Sequence
  spacer sequence TTCN PAM
gcaugggcccugccggaggg

SEQ ID NO: 40262 - RNA, 20 nt, Artificial Sequence
  spacer sequence TTCN PAM
ccgccaggugagagggcagu

SEQ ID NO: 40263 - RNA, 20 nt, Artificial Sequence
  spacer sequence TTCN PAM
ccagccgcgugaccaugggc

SEQ ID NO: 40264 - RNA, 20 nt, Artificial Sequence
  spacer sequence TTCN PAM
cucuugguuggcuuuggagu

SEQ ID NO: 40265 - RNA, 20 nt, Artificial Sequence
  spacer sequence TTCN PAM
uccauucacucuugguuggc

SEQ ID NO: 40266 - RNA, 20 nt, Artificial Sequence
  spacer sequence TTCN PAM
cucucaguuugcuuuggggu

SEQ ID NO: 40267 - RNA, 20 nt, Artificial Sequence
  spacer sequence TTCN PAM
cucauccauucacucucagu

SEQ ID NO: 40268 - RNA, 20 nt, Artificial Sequence
  spacer sequence TTCN PAM
gugcucugacaggcucccuc

SEQ ID NO: 40269 - RNA, 20 nt, Artificial Sequence
  spacer sequence TTCN PAM
gggggagggagccugucaga

SEQ ID NO: 40270 - RNA, 20 nt, Artificial Sequence
  spacer sequence TTCN PAM
gagcacagggaggaggcuuu

SEQ ID NO: 40271 - RNA, 20 nt, Artificial Sequence
  spacer sequence TTCN PAM
aaguccuucccucuccaagg

SEQ ID NO: 40272 - RNA, 20 nt, Artificial Sequence
  spacer sequence TTCN PAM
cucuccaaggacgagagccu

SEQ ID NO: 40273 - RNA, 20 nt, Artificial Sequence
  spacer sequence TTCN PAM
ccaucccacccaccaagggg

SEQ ID NO: 40274 - RNA, 20 nt, Artificial Sequence
  spacer sequence TTCN PAM
cccuuucucggcaagaacuc

SEQ ID NO: 40275 - RNA, 20 nt, Artificial Sequence
  spacer sequence TTCN PAM
cggcaagaacucugaaggug

SEQ ID NO: 40276 - RNA, 20 nt, Artificial Sequence
  spacer sequence TTCN PAM
ugccgagaaagggcgaauuu

SEQ ID NO: 40277 - RNA, 20 nt, Artificial Sequence
  spacer sequence TTCN PAM
gaguucuugccgagaaaggg

SEQ ID NO: 40278 - RNA, 20 nt, Artificial Sequence
  spacer sequence TTCN PAM
cacaguggccugcuccgggc

SEQ ID NO: 40279 - RNA, 20 nt, Artificial Sequence
  spacer sequence TTCN PAM
caggggugacccuggucgug

SEQ ID NO: 40280 - RNA, 20 nt, Artificial Sequence
  spacer sequence TTCN PAM
gggaucuggcugcccggccc

SEQ ID NO: 40281 - RNA, 20 nt, Artificial Sequence
  spacer sequence TTCN PAM
cagacauccucuggccuuca

SEQ ID NO: 40282 - RNA, 20 nt, Artificial Sequence
  spacer sequence TTCN PAM
ucccagacauccucuggccu

SEQ ID NO: 40283 - RNA, 20 nt, Artificial Sequence
  spacer sequence TTCN PAM
agggccgagucagggagaga

SEQ ID NO: 40284 - RNA, 20 nt, Artificial Sequence
  spacer sequence TTCN PAM
ggugcccucccugggauguc

SEQ ID NO: 40285 - RNA, 20 nt, Artificial Sequence
  spacer sequence TTCN PAM
ugacugaggggugcugugcu

SEQ ID NO: 40286 - RNA, 20 nt, Artificial Sequence
  spacer sequence TTCN PAM
uccgggccagggcagccggc

SEQ ID NO: 40287 - RNA, 20 nt, Artificial Sequence
  spacer sequence TTCN PAM
aggccucuuccuccgggcca

SEQ ID NO: 40288 - RNA, 20 nt, Artificial Sequence
  spacer sequence TTCN PAM
uccaggccucuuccuccggg

SEQ ID NO: 40289 - RNA, 20 nt, Artificial Sequence
  spacer sequence TTCN PAM
aacuuucuuccaggccucuu

SEQ ID NO: 40290 - RNA, 20 nt, Artificial Sequence
  spacer sequence TTCN PAM
cuugaaccucggcuuccucu

SEQ ID NO: 40291 - RNA, 20 nt, Artificial Sequence
  spacer sequence TTCN PAM
agagaagagcaugggagggg

SEQ ID NO: 40292 - RNA, 20 nt, Artificial Sequence
  spacer sequence TTCN PAM
ucugccccucuguaaaacac

SEQ ID NO: 40293 - RNA, 20 nt, Artificial Sequence
  spacer sequence TTCN PAM
ugccugugacugcugggacg

SEQ ID NO: 40294 - RNA, 20 nt, Artificial Sequence
  spacer sequence TTCN PAM
gagcaggcgggaacaacagg

SEQ ID NO: 40295 - RNA, 20 nt, Artificial Sequence
  spacer sequence TTCN PAM
cgccugcucagaacguccuu

SEQ ID NO: 40296 - RNA, 20 nt, Artificial Sequence
  spacer sequence TTCN PAM
gggaagaagcagccagggga

SEQ ID NO: 40297 - RNA, 20 nt, Artificial Sequence
  spacer sequence TTCN PAM
cggaaugccuguuguucccg

SEQ ID NO: 40298 - RNA, 20 nt, Artificial Sequence
  spacer sequence TTCN PAM
ucccggaaugccuguuguuc

SEQ ID NO: 40299 - RNA, 20 nt, Artificial Sequence
  spacer sequence TTCN PAM
gaauguuaaucaguucaucc

SEQ ID NO: 40300 - RNA, 20 nt, Artificial Sequence
  spacer sequence TTCN PAM
gaaaaguuaaaaaaaaaaaa

SEQ ID NO: 40301 - RNA, 20 nt, Artificial Sequence
  spacer sequence TTCN PAM
uccagggagacacccaccgu

SEQ ID NO: 40302 - RNA, 20 nt, Artificial Sequence
  spacer sequence TTCN PAM
ucgggacucugggguggugg

SEQ ID NO: 40303 - RNA, 20 nt, Artificial Sequence
  spacer sequence TTCN PAM
ggacucugggguggugggaa

SEQ ID NO: 40304 - RNA, 20 nt, Artificial Sequence
  spacer sequence TTCN PAM
caccaccccagagucccgaa

SEQ ID NO: 40305 - RNA, 20 nt, Artificial Sequence
  spacer sequence TTCN PAM
ccuucaccgacacacgcugc

SEQ ID NO: 40306 - RNA, 20 nt, Artificial Sequence
  spacer sequence TTCN PAM
ccgacacacgcugcucccgg

SEQ ID NO: 40307 - RNA, 20 nt, Artificial Sequence
  spacer sequence TTCN PAM
agggacaggcgggagggagg

SEQ ID NO: 40308 - RNA, 20 nt, Artificial Sequence
  spacer sequence TTCN PAM
aacccggcuuccagggacag

SEQ ID NO: 40309 - RNA, 20 nt, Artificial Sequence
  spacer sequence TTCN PAM
gcauggaggucccccgguuu

SEQ ID NO: 40310 - RNA, 20 nt, Artificial Sequence
  spacer sequence TTCN PAM
guuucugcauggaggucccc

SEQ ID NO: 40311 - RNA, 20 nt, Artificial Sequence
  spacer sequence TTCN PAM
ggggcagaugguuuuucggu

SEQ ID NO: 40312 - RNA, 20 nt, Artificial Sequence
  spacer sequence TTCN PAM
cuucuggggcagaugguuuu

SEQ ID NO: 40313 - RNA, 20 nt, Artificial Sequence
  spacer sequence TTCN PAM
cggccccgcagcgcagcccu

SEQ ID NO: 40314 - RNA, 20 nt, Artificial Sequence
  spacer sequence TTCN PAM
uccuccuuguccccgguccc

SEQ ID NO: 40315 - RNA, 20 nt, Artificial Sequence
  spacer sequence TTCN PAM
ugccccuuccuccuccuugu

SEQ ID NO: 40316 - RNA, 20 nt, Artificial Sequence
  spacer sequence TTCN PAM
ugacuccaggcuccucgggc

SEQ ID NO: 40317 - RNA, 20 nt, Artificial Sequence
  spacer sequence TTCN PAM
ugggagugacccccggucuc

SEQ ID NO: 40318 - RNA, 20 nt, Artificial Sequence
  spacer sequence TTCN PAM
cuuuuggggacucucgacuc

SEQ ID NO: 40319 - RNA, 20 nt, Artificial Sequence
  spacer sequence TTCN PAM
ucgguauccuggccuucccu

SEQ ID NO: 40320 - RNA, 20 nt, Artificial Sequence
  spacer sequence TTCN PAM
gguaacccuugaccccgcac

SEQ ID NO: 40321 - RNA, 20 nt, Artificial Sequence
  spacer sequence TTCN PAM
uuuucugguaacccuugacc

SEQ ID NO: 40322 - RNA, 20 nt, Artificial Sequence
  spacer sequence TTCN PAM
gggugacucccuguaccgcg

SEQ ID NO: 40323 - RNA, 20 nt, Artificial Sequence
  spacer sequence TTCN PAM
cgcucuuccgggugacuccc

SEQ ID NO: 40324 - RNA, 20 nt, Artificial Sequence
  spacer sequence TTCN PAM
uucccgcucuuccgggugac

SEQ ID NO: 40325 - RNA, 20 nt, Artificial Sequence
  spacer sequence TTCN PAM
acgacaacccucccaaccuu

SEQ ID NO: 40326 - RNA, 20 nt, Artificial Sequence
  spacer sequence TTCN PAM
cggcagggggucgccggggg

SEQ ID NO: 40327 - RNA, 20 nt, Artificial Sequence
  spacer sequence TTCN PAM
cggcgguggucgcggggcag

SEQ ID NO: 40328 - RNA, 20 nt, Artificial Sequence
  spacer sequence TTCN PAM
ccgccaacguugaccccgcg

SEQ ID NO: 40329 - RNA, 20 nt, Artificial Sequence
  spacer sequence TTCN PAM
gaccccgcccuucgccgcca

SEQ ID NO: 40330 - RNA, 20 nt, Artificial Sequence
  spacer sequence TTCN PAM
gggggccguggggcgggggc

SEQ ID NO: 40331 - RNA, 20 nt, Artificial Sequence
  spacer sequence TTCN PAM
ccgagccucgcagcugccgc

SEQ ID NO: 40332 - RNA, 20 nt, Artificial Sequence
  spacer sequence TTCN PAM
ggguuucgggcgccaucuug

SEQ ID NO: 40333 - RNA, 20 nt, Artificial Sequence
  spacer sequence TTCN PAM
ggcgccaucuugggggcccc

SEQ ID NO: 40334 - RNA, 20 nt, Artificial Sequence
  spacer sequence TTCN PAM
ggucaugccgcggggcgggg

SEQ ID NO: 40335 - RNA, 20 nt, Artificial Sequence
  spacer sequence TTCN PAM
ggggcggggccaccuuccaa

SEQ ID NO: 40336 - RNA, 20 nt, Artificial Sequence
  spacer sequence TTCN PAM
aagccaaucccuugaggucc

SEQ ID NO: 40337 - RNA, 20 nt, Artificial Sequence
  spacer sequence TTCN PAM
gcuauucggaaggggcuggg

SEQ ID NO: 40338 - RNA, 20 nt, Artificial Sequence
  spacer sequence TTCN PAM
gaaggggcugggacuccuac

SEQ ID NO: 40339 - RNA, 20 nt, Artificial Sequence
  spacer sequence TTCN PAM
gaauagcggaaggaccucaa

SEQ ID NO: 40340 - RNA, 20 nt, Artificial Sequence
  spacer sequence TTCN PAM
aaucccgcccugccugguuc

SEQ ID NO: 40341 - RNA, 20 nt, Artificial Sequence
  spacer sequence TTCN PAM
aacccagagccguaggaguc

SEQ ID NO: 40342 - RNA, 20 nt, Artificial Sequence
  spacer sequence TTCN PAM
cuugagaccccagcaugugc

SEQ ID NO: 40343 - RNA, 20 nt, Artificial Sequence
  spacer sequence TTCN PAM
ccuccucaagccucaguuuc

SEQ ID NO: 40344 - RNA, 20 nt, Artificial Sequence
  spacer sequence TTCN PAM
ucuucugcaccgugcuggug

SEQ ID NO: 40345 - RNA, 20 nt, Artificial Sequence
  spacer sequence TTCN PAM
gcaccgugcuggugaaaugg

SEQ ID NO: 40346 - RNA, 20 nt, Artificial Sequence
  spacer sequence TTCN PAM
ccagcacggugcagaagagg

SEQ ID NO: 40347 - RNA, 20 nt, Artificial Sequence
  spacer sequence TTCN PAM
auuucaccagcacggugcag

SEQ ID NO: 40348 - RNA, 20 nt, Artificial Sequence
  spacer sequence TTCN PAM
uccuuccucagaacccccuc

SEQ ID NO: 40349 - RNA, 20 nt, Artificial Sequence
  spacer sequence TTCN PAM
ucagaacccccuccaagccu

SEQ ID NO: 40350 - RNA, 20 nt, Artificial Sequence
  spacer sequence TTCN PAM
gaggaaggaggaaaaaaggg

SEQ ID NO: 40351 - RNA, 20 nt, Artificial Sequence
  spacer sequence TTCN PAM
ucauauuguccagguuggcc

SEQ ID NO: 40352 - RNA, 20 nt, Artificial Sequence
  spacer sequence TTCN PAM
agcgauacuacugccucagc

SEQ ID NO: 40353 - RNA, 20 nt, Artificial Sequence
  spacer sequence TTCN PAM
uuauuuauuuauuuauuuuu

SEQ ID NO: 40354 - RNA, 20 nt, Artificial Sequence
  spacer sequence TTCN PAM
uuuuauuuuauuucguuauu

SEQ ID NO: 40355 - RNA, 20 nt, Artificial Sequence
  spacer sequence TTCN PAM
ugagagaguaugucugacag

SEQ ID NO: 40356 - RNA, 20 nt, Artificial Sequence
  spacer sequence TTCN PAM
uuaaucucucucccuaacca

SEQ ID NO: 40357 - RNA, 20 nt, Artificial Sequence
  spacer sequence TTCN PAM
ggacgcuucagcauggugac

SEQ ID NO: 40358 - RNA, 20 nt, Artificial Sequence
  spacer sequence TTCN PAM
gcauggugacuggcacaugg

SEQ ID NO: 40359 - RNA, 20 nt, Artificial Sequence
  spacer sequence TTCN PAM
ggcagggccacgggggccug

SEQ ID NO: 40360 - RNA, 20 nt, Artificial Sequence
  spacer sequence TTCN PAM
ugugacuugagccagugaag

SEQ ID NO: 40361 - RNA, 20 nt, Artificial Sequence
  spacer sequence TTCN PAM
cuggcucaagucacaggaaa

SEQ ID NO: 40362 - RNA, 20 nt, Artificial Sequence
  spacer sequence TTCN PAM
gccaugacaauacugauaca

SEQ ID NO: 40363 - RNA, 20 nt, Artificial Sequence
  spacer sequence TTCN PAM
aacccccugaaacuagaguu

SEQ ID NO: 40364 - RNA, 20 nt, Artificial Sequence
  spacer sequence TTCN PAM
ggggguuggaaugggggcag

SEQ ID NO: 40365 - RNA, 20 nt, Artificial Sequence
  spacer sequence TTCN PAM
ccaugacuuuguuaauucau

SEQ ID NO: 40366 - RNA, 20 nt, Artificial Sequence
  spacer sequence TTCN PAM
uucagugacuucuaaucgau

SEQ ID NO: 40367 - RNA, 20 nt, Artificial Sequence
  spacer sequence TTCN PAM
gugacuucuaaucgaugcug

SEQ ID NO: 40368 - RNA, 20 nt, Artificial Sequence
  spacer sequence TTCN PAM
aaucgaugcugcucugugcu

SEQ ID NO: 40369 - RNA, 20 nt, Artificial Sequence
  spacer sequence TTCN PAM
cagcucaugaccaagcacag

SEQ ID NO: 40370 - RNA, 20 nt, Artificial Sequence
  spacer sequence TTCN PAM
gauguugggacagacagcug

SEQ ID NO: 40371 - RNA, 20 nt, Artificial Sequence
  spacer sequence TTCN PAM
cucuccccuagaccaggggc

SEQ ID NO: 40372 - RNA, 20 nt, Artificial Sequence
  spacer sequence TTCN PAM
acccucccagagaucccgca

SEQ ID NO: 40373 - RNA, 20 nt, Artificial Sequence
  spacer sequence TTCN PAM
uagagggcugcaugcugaag

SEQ ID NO: 40374 - RNA, 20 nt, Artificial Sequence
  spacer sequence TTCN PAM
gcaugcagcccucuaugaag

SEQ ID NO: 40375 - RNA, 20 nt, Artificial Sequence
  spacer sequence TTCN PAM
acacacucuucagcaugcag

SEQ ID NO: 40376 - RNA, 20 nt, Artificial Sequence
  spacer sequence TTCN PAM
aaaccccagcuucaacacac

SEQ ID NO: 40377 - RNA, 20 nt, Artificial Sequence
  spacer sequence TTCN PAM
aguaggaguguaccagguag

SEQ ID NO: 40378 - RNA, 20 nt, Artificial Sequence
  spacer sequence TTCN PAM
uacucuugucuaccugguac

SEQ ID NO: 40379 - RNA, 20 nt, Artificial Sequence
  spacer sequence TTCN PAM
uccuacucuugucuaccugg

SEQ ID NO: 40380 - RNA, 20 nt, Artificial Sequence
  spacer sequence TTCN PAM
uugcccggacuguucuuccu

SEQ ID NO: 40381 - RNA, 20 nt, Artificial Sequence
  spacer sequence TTCN PAM
uccugccucagacucccgua

SEQ ID NO: 40382 - RNA, 20 nt, Artificial Sequence
  spacer sequence TTCN PAM
ccauguuggccaggcugguc

SEQ ID NO: 40383 - RNA, 20 nt, Artificial Sequence
  spacer sequence TTCN PAM
cagcuacuagggaggcugag

SEQ ID NO: 40384 - RNA, 20 nt, Artificial Sequence
  spacer sequence TTCN PAM
ccugccucagccucccuagu

SEQ ID NO: 40385 - RNA, 20 nt, Artificial Sequence
  spacer sequence TTCN PAM
agcgauucuccugccucagc

SEQ ID NO: 40386 - RNA, 20 nt, Artificial Sequence
  spacer sequence TTCN PAM
gucucaaaaaaacaaacaaa

SEQ ID NO: 40387 - RNA, 20 nt, Artificial Sequence
  spacer sequence TTCN PAM
cccaccucagccucccaaag

SEQ ID NO: 40388 - RNA, 20 nt, Artificial Sequence
  spacer sequence TTCN PAM
gaccuaggugauucacccac

SEQ ID NO: 40389 - RNA, 20 nt, Artificial Sequence
  spacer sequence TTCN PAM
acaccagccugacgaacaug

SEQ ID NO: 40390 - RNA, 20 nt, Artificial Sequence
  spacer sequence TTCN PAM
ucaggcugguguugaacuuc

SEQ ID NO: 40391 - RNA, 20 nt, Artificial Sequence
  spacer sequence TTCN PAM
ccauguucgucaggcuggug

SEQ ID NO: 40392 - RNA, 20 nt, Artificial Sequence
  spacer sequence TTCN PAM
ccugccucagccuccugagu

SEQ ID NO: 40393 - RNA, 20 nt, Artificial Sequence
  spacer sequence TTCN PAM
agugauucuccugccucagc

SEQ ID NO: 40394 - RNA, 20 nt, Artificial Sequence
  spacer sequence TTCN PAM
ggccaaggaccccugucauc

SEQ ID NO: 40395 - RNA, 20 nt, Artificial Sequence
  spacer sequence TTCN PAM
ccaucugcccccuugugcuu

SEQ ID NO: 40396 - RNA, 20 nt, Artificial Sequence
  spacer sequence TTCN PAM
gggucugaguuuccccaucu

SEQ ID NO: 40397 - RNA, 20 nt, Artificial Sequence
  spacer sequence TTCN PAM
gccuucugggucugaguuuc

SEQ ID NO: 40398 - RNA, 20 nt, Artificial Sequence
  spacer sequence TTCN PAM
gcaucucacucuggacauau

SEQ ID NO: 40399 - RNA, 20 nt, Artificial Sequence
  spacer sequence TTCN PAM
gcucauugggggucuccuuu

SEQ ID NO: 40400 - RNA, 20 nt, Artificial Sequence
  spacer sequence TTCN PAM
gucaccauggguaaaggaga

SEQ ID NO: 40401 - RNA, 20 nt, Artificial Sequence
  spacer sequence TTCN PAM
ucagagucccgcagagcagc

SEQ ID NO: 40402 - RNA, 20 nt, Artificial Sequence
  spacer sequence TTCN PAM
cuccacacugaaucucuuuu

SEQ ID NO: 40403 - RNA, 20 nt, Artificial Sequence
  spacer sequence TTCN PAM
guguggagggaaguaucucu

SEQ ID NO: 40404 - RNA, 20 nt, Artificial Sequence
  spacer sequence TTCN PAM
ugccauucuccugccucagc

SEQ ID NO: 40405 - RNA, 20 nt, Artificial Sequence
  spacer sequence TTCN PAM
ccugccucagccuccugagu

SEQ ID NO: 40406 - RNA, 20 nt, Artificial Sequence
  spacer sequence TTCN PAM
ccguguuagccaggaugguc

SEQ ID NO: 40407 - RNA, 20 nt, Artificial Sequence
  spacer sequence TTCN PAM
cuuuuuuuugagauggaguu

SEQ ID NO: 40408 - RNA, 20 nt, Artificial Sequence
  spacer sequence TTCN PAM
cuccuguugcccaggcugga

SEQ ID NO: 40409 - RNA, 20 nt, Artificial Sequence
  spacer sequence TTCN PAM
agugguuauccugccucagc

SEQ ID NO: 40410 - RNA, 20 nt, Artificial Sequence
  spacer sequence TTCN PAM
guagaaauaggguuucucca

SEQ ID NO: 40411 - RNA, 20 nt, Artificial Sequence
  spacer sequence TTCN PAM
acggaaaauacaaaauuagc

SEQ ID NO: 40412 - RNA, 20 nt, Artificial Sequence
  spacer sequence TTCN PAM
ccauguuggucaggcugguc

SEQ ID NO: 40413 - RNA, 20 nt, Artificial Sequence
  spacer sequence TTCN PAM
cagcaaauugaacagcaguu

SEQ ID NO: 40414 - RNA, 20 nt, Artificial Sequence
  spacer sequence TTCN PAM
auuugcugugaaaagagucu

SEQ ID NO: 40415 - RNA, 20 nt, Artificial Sequence
  spacer sequence TTCN PAM
aaaucuuuagugccuauugc

SEQ ID NO: 40416 - RNA, 20 nt, Artificial Sequence
  spacer sequence TTCN PAM
ucacccuuccaaaucuuuag

SEQ ID NO: 40417 - RNA, 20 nt, Artificial Sequence
  spacer sequence TTCN PAM
ucccacacuggaccauccac

SEQ ID NO: 40418 - RNA, 20 nt, Artificial Sequence
  spacer sequence TTCN PAM
acugauccucaaaaguugug

SEQ ID NO: 40419 - RNA, 20 nt, Artificial Sequence
  spacer sequence TTCN PAM
uuuccacugauccucaaaag

SEQ ID NO: 40420 - RNA, 20 nt, Artificial Sequence
  spacer sequence TTCN PAM
uagcuuggguuaggcaacag

SEQ ID NO: 40421 - RNA, 20 nt, Artificial Sequence
  spacer sequence TTCN PAM
gagugcaggcggugggcgaa

SEQ ID NO: 40422 - RNA, 20 nt, Artificial Sequence
  spacer sequence TTCN PAM
cccaccgccugcacucagaa

SEQ ID NO: 40423 - RNA, 20 nt, Artificial Sequence
  spacer sequence TTCN PAM
cgagggaggaaacugaggca

SEQ ID NO: 40424 - RNA, 20 nt, Artificial Sequence
  spacer sequence TTCN PAM
ucccucgugaaaugcaggua

SEQ ID NO: 40425 - RNA, 20 nt, Artificial Sequence
  spacer sequence TTCN PAM
ugccucaguuuccucccucg

SEQ ID NO: 40426 - RNA, 20 nt, Artificial Sequence
  spacer sequence TTCN PAM
gaagcugcccugaggucacc

SEQ ID NO: 40427 - RNA, 20 nt, Artificial Sequence
  spacer sequence TTCN PAM
gaacaguucgugccucaguu

SEQ ID NO: 40428 - RNA, 20 nt, Artificial Sequence
  spacer sequence TTCN PAM
uagcucacuuggugaccuca

SEQ ID NO: 40429 - RNA, 20 nt, Artificial Sequence
  spacer sequence TTCN PAM
cgagguggauguggcagaga

SEQ ID NO: 40430 - RNA, 20 nt, Artificial Sequence
  spacer sequence TTCN PAM
ugccugcugagauggcugga

SEQ ID NO: 40431 - RNA, 20 nt, Artificial Sequence
  spacer sequence TTCN PAM
cuaagcaucccccaacuugg

SEQ ID NO: 40432 - RNA, 20 nt, Artificial Sequence
  spacer sequence TTCN PAM
agggaaucacaggggguggc

SEQ ID NO: 40433 - RNA, 20 nt, Artificial Sequence
  spacer sequence TTCN PAM
cuggaaauccccgcaucuga

SEQ ID NO: 40434 - RNA, 20 nt, Artificial Sequence
  spacer sequence TTCN PAM
ggagccacccccugugauuc

SEQ ID NO: 40435 - RNA, 20 nt, Artificial Sequence
  spacer sequence TTCN PAM
cagcacuguacuccaggcug

SEQ ID NO: 40436 - RNA, 20 nt, Artificial Sequence
  spacer sequence TTCN PAM
caccuauaaaauggggaggg

SEQ ID NO: 40437 - RNA, 20 nt, Artificial Sequence
  spacer sequence TTCN PAM
cgucucagccucccaaagug

SEQ ID NO: 40438 - RNA, 20 nt, Artificial Sequence
  spacer sequence TTCN PAM
ccauguuauccaggaugguc

SEQ ID NO: 40439 - RNA, 20 nt, Artificial Sequence
  spacer sequence TTCN PAM
ccugccucagccuccggagu

SEQ ID NO: 40440 - RNA, 20 nt, Artificial Sequence
  spacer sequence TTCN PAM
agcgauucuccugccucagc

SEQ ID NO: 40441 - RNA, 20 nt, Artificial Sequence
  spacer sequence TTCN PAM
gacaacucaauggacagaca

SEQ ID NO: 40442 - RNA, 20 nt, Artificial Sequence
  spacer sequence TTCN PAM
auuaggcacugucuguccau

SEQ ID NO: 40443 - RNA, 20 nt, Artificial Sequence
  spacer sequence TTCN PAM
uagugguuaaauucuauuag

SEQ ID NO: 40444 - RNA, 20 nt, Artificial Sequence
  spacer sequence TTCN PAM
aaaugaaauucuuuuuuuuu

SEQ ID NO: 40445 - RNA, 20 nt, Artificial Sequence
  spacer sequence TTCN PAM
uuuggaaauauucguagugg

SEQ ID NO: 40446 - RNA, 20 nt, Artificial Sequence
  spacer sequence TTCN PAM
uuuuuuuuuuuuuuuugaga

SEQ ID NO: 40447 - RNA, 20 nt, Artificial Sequence
  spacer sequence TTCN PAM
ucucaaaaaaaaaaaaaaaa

SEQ ID NO: 40448 - RNA, 20 nt, Artificial Sequence
  spacer sequence TTCN PAM
cccaggcuggagugcagggg

SEQ ID NO: 40449 - RNA, 20 nt, Artificial Sequence
  spacer sequence TTCN PAM
guagaggcaggguuucacca

SEQ ID NO: 40450 - RNA, 20 nt, Artificial Sequence
  spacer sequence TTCN PAM
ccauguugaccaggaugguc

SEQ ID NO: 40451 - RNA, 20 nt, Artificial Sequence
  spacer sequence TTCN PAM
aggcuugagccacccuaggg

SEQ ID NO: 40452 - RNA, 20 nt, Artificial Sequence
  spacer sequence TTCN PAM
cuaggguggcucaagccugg

SEQ ID NO: 40453 - RNA, 20 nt, Artificial Sequence
  spacer sequence TTCN PAM
ugauuuuccucggcccaguc

SEQ ID NO: 40454 - RNA, 20 nt, Artificial Sequence
  spacer sequence TTCN PAM
ucggcccaguccauggcguc

SEQ ID NO: 40455 - RNA, 20 nt, Artificial Sequence
  spacer sequence TTCN PAM
gugacgccauggacugggcc

SEQ ID NO: 40456 - RNA, 20 nt, Artificial Sequence
  spacer sequence TTCN PAM
augagaaaauaauaaggaug

SEQ ID NO: 40457 - RNA, 20 nt, Artificial Sequence
  spacer sequence TTCN PAM
cauugaacauccacuucagu

SEQ ID NO: 40458 - RNA, 20 nt, Artificial Sequence
  spacer sequence TTCN PAM
uccuuauuauuuucucauug

SEQ ID NO: 40459 - RNA, 20 nt, Artificial Sequence
  spacer sequence TTCN PAM
agagaggaggcauuuuugac

SEQ ID NO: 40460 - RNA, 20 nt, Artificial Sequence
  spacer sequence TTCN PAM
aaagucugagccaggagagc

SEQ ID NO: 40461 - RNA, 20 nt, Artificial Sequence
  spacer sequence TTCN PAM
ccauuuuacccagauuaguc

SEQ ID NO: 40462 - RNA, 20 nt, Artificial Sequence
  spacer sequence TTCN PAM
agacuaaucuggguaaaaug

SEQ ID NO: 40463 - RNA, 20 nt, Artificial Sequence
  spacer sequence TTCN PAM
uucuuucuuucuuucuuucu

SEQ ID NO: 40464 - RNA, 20 nt, Artificial Sequence
  spacer sequence TTCN PAM
uucuuucuuucuuucuuucu

SEQ ID NO: 40465 - RNA, 20 nt, Artificial Sequence
  spacer sequence TTCN PAM
uucuuucuuucuuucuuucu

SEQ ID NO: 40466 - RNA, 20 nt, Artificial Sequence
  spacer sequence TTCN PAM
uucuuucuuucuuucuuucu

SEQ ID NO: 40467 - RNA, 20 nt, Artificial Sequence
  spacer sequence TTCN PAM
uucuuucuuucuuucuuucu

SEQ ID NO: 40468 - RNA, 20 nt, Artificial Sequence
  spacer sequence TTCN PAM
uucuuucuuucuuucuuucu

SEQ ID NO: 40469 - RNA, 20 nt, Artificial Sequence
  spacer sequence TTCN PAM
uucuuucuuucuuucuuucu

SEQ ID NO: 40470 - RNA, 20 nt, Artificial Sequence
  spacer sequence TTCN PAM
uucuuucuuucuuucuuucu

SEQ ID NO: 40471 - RNA, 20 nt, Artificial Sequence
  spacer sequence TTCN PAM
uucuuucuuucuuucuuucu

SEQ ID NO: 40472 - RNA, 20 nt, Artificial Sequence
  spacer sequence TTCN PAM
uucuuucuuucuuucuuucu

SEQ ID NO: 40473 - RNA, 20 nt, Artificial Sequence
  spacer sequence TTCN PAM
uucuuucuuucuuucuuucu

SEQ ID NO: 40474 - RNA, 20 nt, Artificial Sequence
  spacer sequence TTCN PAM
uucuuucuuucuuucucucu

SEQ ID NO: 40475 - RNA, 20 nt, Artificial Sequence
  spacer sequence TTCN PAM
uucuuucuuucucucuuucu

SEQ ID NO: 40476 - RNA, 20 nt, Artificial Sequence
  spacer sequence TTCN PAM
uucuuucucucuuucuuucu

SEQ ID NO: 40477 - RNA, 20 nt, Artificial Sequence
  spacer sequence TTCN PAM
uucucucuuucuuucucucu

SEQ ID NO: 40478 - RNA, 20 nt, Artificial Sequence
  spacer sequence TTCN PAM
cucuuucuuucucucucucu

SEQ ID NO: 40479 - RNA, 20 nt, Artificial Sequence
  spacer sequence TTCN PAM
uucucucucucucucuauuu

SEQ ID NO: 40480 - RNA, 20 nt, Artificial Sequence
  spacer sequence TTCN PAM
cucucucucucuauuuccuu

SEQ ID NO: 40481 - RNA, 20 nt, Artificial Sequence
  spacer sequence TTCN PAM
uucuuucuuucuuucucucu

SEQ ID NO: 40482 - RNA, 20 nt, Artificial Sequence
  spacer sequence TTCN PAM
uucuuucuuucucucucucu

SEQ ID NO: 40483 - RNA, 20 nt, Artificial Sequence
  spacer sequence TTCN PAM
uucuuucucucucucucucu

SEQ ID NO: 40484 - RNA, 20 nt, Artificial Sequence
  spacer sequence TTCN PAM
uucucucucucucucuuucu

SEQ ID NO: 40485 - RNA, 20 nt, Artificial Sequence
  spacer sequence TTCN PAM
cucucucucucuuucuuucu

SEQ ID NO: 40486 - RNA, 20 nt, Artificial Sequence
  spacer sequence TTCN PAM
uucucucucucuuucuuucu

SEQ ID NO: 40487 - RNA, 20 nt, Artificial Sequence
  spacer sequence TTCN PAM
cucucucuuucuuucuuuuu

SEQ ID NO: 40488 - RNA, 20 nt, Artificial Sequence
  spacer sequence TTCN PAM
uucuuuuuuuuguagagaug

SEQ ID NO: 40489 - RNA, 20 nt, Artificial Sequence
  spacer sequence TTCN PAM
uuuuuuuguagagauggggu

SEQ ID NO: 40490 - RNA, 20 nt, Artificial Sequence
  spacer sequence TTCN PAM
aauugcagaaaacuucagac

SEQ ID NO: 40491 - RNA, 20 nt, Artificial Sequence
  spacer sequence TTCN PAM
gcaauuugaaauaauuaaga

SEQ ID NO: 40492 - RNA, 20 nt, Artificial Sequence
  spacer sequence TTCN PAM
gacaaacaugaagguuguuu

SEQ ID NO: 40493 - RNA, 20 nt, Artificial Sequence
  spacer sequence TTCN PAM
uguuugucugaaguuuucug

SEQ ID NO: 40494 - RNA, 20 nt, Artificial Sequence
  spacer sequence TTCN PAM
ugggcugugccucaguuucc

SEQ ID NO: 40495 - RNA, 20 nt, Artificial Sequence
  spacer sequence TTCN PAM
ccaucugggagaugccagcc

SEQ ID NO: 40496 - RNA, 20 nt, Artificial Sequence
  spacer sequence TTCN PAM
ccucccggccucagugucuc

SEQ ID NO: 40497 - RNA, 20 nt, Artificial Sequence
  spacer sequence TTCN PAM
ugccgcccaggagagacacu

SEQ ID NO: 40498 - RNA, 20 nt, Artificial Sequence
  spacer sequence TTCN PAM
uguuucuccacauucuggaa

SEQ ID NO: 40499 - RNA, 20 nt, Artificial Sequence
  spacer sequence TTCN PAM
ccacauucuggaaagucccu

SEQ ID NO: 40500 - RNA, 20 nt, Artificial Sequence
  spacer sequence TTCN PAM
ggaaagucccuguguuccca

SEQ ID NO: 40501 - RNA, 20 nt, Artificial Sequence
  spacer sequence TTCN PAM
agaauguggagaaacaggaa

SEQ ID NO: 40502 - RNA, 20 nt, Artificial Sequence
  spacer sequence TTCN PAM
caggcagagggggcaccucc

SEQ ID NO: 40503 - RNA, 20 nt, Artificial Sequence
  spacer sequence TTCN PAM
ccuuccuccacccacuuccc

SEQ ID NO: 40504 - RNA, 20 nt, Artificial Sequence
  spacer sequence TTCN PAM
uccacccacuuccccagcgg

SEQ ID NO: 40505 - RNA, 20 nt, Artificial Sequence
  spacer sequence TTCN PAM
ccagcggacgggccugggac

SEQ ID NO: 40506 - RNA, 20 nt, Artificial Sequence
  spacer sequence TTCN PAM
ccuccugccucucuccucuu

SEQ ID NO: 40507 - RNA, 20 nt, Artificial Sequence
  spacer sequence TTCN PAM
uucccaaucaggcccuuccu

SEQ ID NO: 40508 - RNA, 20 nt, Artificial Sequence
  spacer sequence TTCN PAM
caaucaggcccuuccuggug

SEQ ID NO: 40509 - RNA, 20 nt, Artificial Sequence
  spacer sequence TTCN PAM
uggugugcagaagggaaagc

SEQ ID NO: 40510 - RNA, 20 nt, Artificial Sequence
  spacer sequence TTCN PAM
gcacaccaggaagggccuga

SEQ ID NO: 40511 - RNA, 20 nt, Artificial Sequence
  spacer sequence TTCN PAM
cuucugcacaccaggaaggg

SEQ ID NO: 40512 - RNA, 20 nt, Artificial Sequence
  spacer sequence TTCN PAM
acagcagcugggccugcccg

SEQ ID NO: 40513 - RNA, 20 nt, Artificial Sequence
  spacer sequence TTCN PAM
cugucuccuugucugucugu

SEQ ID NO: 40514 - RNA, 20 nt, Artificial Sequence
  spacer sequence TTCN PAM
ucucucuguuucuggcucuc

SEQ ID NO: 40515 - RNA, 20 nt, Artificial Sequence
  spacer sequence TTCN PAM
ggcucucuuugucucucugu

SEQ ID NO: 40516 - RNA, 20 nt, Artificial Sequence
  spacer sequence TTCN PAM
gucucuuucugugucucuuu

SEQ ID NO: 40517 - RNA, 20 nt, Artificial Sequence
  spacer sequence TTCN PAM
gugucucuuugucugugucu

SEQ ID NO: 40518 - RNA, 20 nt, Artificial Sequence
  spacer sequence TTCN PAM
cuggcucuggcucugugucc

SEQ ID NO: 40519 - RNA, 20 nt, Artificial Sequence
  spacer sequence TTCN PAM
uuuuuuuuuuuuuuuuuuuu

SEQ ID NO: 40520 - RNA, 20 nt, Artificial Sequence
  spacer sequence TTCN PAM
cgccauucuccugccucagc

SEQ ID NO: 40521 - RNA, 20 nt, Artificial Sequence
  spacer sequence TTCN PAM
ccugccucagccucccaagu

SEQ ID NO: 40522 - RNA, 20 nt, Artificial Sequence
  spacer sequence TTCN PAM
ccguguuagccaggaugguc

SEQ ID NO: 40523 - RNA, 20 nt, Artificial Sequence
  spacer sequence TTCN PAM
cugucucucucuuugucucu

SEQ ID NO: 40524 - RNA, 20 nt, Artificial Sequence
  spacer sequence TTCN PAM
cuagcucucucuuugucucu

SEQ ID NO: 40525 - RNA, 20 nt, Artificial Sequence
  spacer sequence TTCN PAM
cuaucucugucuaucucugu

SEQ ID NO: 40526 - RNA, 20 nt, Artificial Sequence
  spacer sequence TTCN PAM
uuugccaccaucccccuccc

SEQ ID NO: 40527 - RNA, 20 nt, Artificial Sequence
  spacer sequence TTCN PAM
cgggcccugcagccaccugc

SEQ ID NO: 40528 - RNA, 20 nt, Artificial Sequence
  spacer sequence TTCN PAM
cuaaaguugucuuggcacag

SEQ ID NO: 40529 - RNA, 20 nt, Artificial Sequence
  spacer sequence TTCN PAM
acaugggacaggcuuucuca

SEQ ID NO: 40530 - RNA, 20 nt, Artificial Sequence
  spacer sequence TTCN PAM
caccuccgcacugacgcuag

SEQ ID NO: 40531 - RNA, 20 nt, Artificial Sequence
  spacer sequence TTCN PAM
acccagcuguccuagcguca

SEQ ID NO: 40532 - RNA, 20 nt, Artificial Sequence
  spacer sequence TTCN PAM
cccagccugcccugggugcc

SEQ ID NO: 40533 - RNA, 20 nt, Artificial Sequence
  spacer sequence TTCN PAM
uucacccagccugcccuggg

SEQ ID NO: 40534 - RNA, 20 nt, Artificial Sequence
  spacer sequence TTCN PAM
cccuguuuauccucccugca

SEQ ID NO: 40535 - RNA, 20 nt, Artificial Sequence
  spacer sequence TTCN PAM
aggcccuccaggguccccuc

SEQ ID NO: 40536 - RNA, 20 nt, Artificial Sequence
  spacer sequence TTCN PAM
gggggcacuagggaaccauu

SEQ ID NO: 40537 - RNA, 20 nt, Artificial Sequence
  spacer sequence TTCN PAM
cuagugcccccagaauacag

SEQ ID NO: 40538 - RNA, 20 nt, Artificial Sequence
  spacer sequence TTCN PAM
ggagcaacggagugguacag

SEQ ID NO: 40539 - RNA, 20 nt, Artificial Sequence
  spacer sequence TTCN PAM
gucccugugccucaccccau

SEQ ID NO: 40540 - RNA, 20 nt, Artificial Sequence
  spacer sequence TTCN PAM
gaucagaaggcucaucuggu

SEQ ID NO: 40541 - RNA, 20 nt, Artificial Sequence
  spacer sequence TTCN PAM
gaucugaaauucggucccug

SEQ ID NO: 40542 - RNA, 20 nt, Artificial Sequence
  spacer sequence TTCN PAM
uccucggggcaguugagccu

SEQ ID NO: 40543 - RNA, 20 nt, Artificial Sequence
  spacer sequence TTCN PAM
ucauccucggggcaguugag

SEQ ID NO: 40544 - RNA, 20 nt, Artificial Sequence
  spacer sequence TTCN PAM
ccguguuggcagguuggucu

SEQ ID NO: 40545 - RNA, 20 nt, Artificial Sequence
  spacer sequence TTCN PAM
guagagacgggguuucaccg

SEQ ID NO: 40546 - RNA, 20 nt, Artificial Sequence
  spacer sequence TTCN PAM
cuugccucagccugccgagu

SEQ ID NO: 40547 - RNA, 20 nt, Artificial Sequence
  spacer sequence TTCN PAM
agcaauucccuugccucagc

SEQ ID NO: 40548 - RNA, 20 nt, Artificial Sequence
  spacer sequence TTCN PAM
gucucaaaaaaaaaagagcc

SEQ ID NO: 40549 - RNA, 20 nt, Artificial Sequence
  spacer sequence TTCN PAM
aaguuuggcucuuuuuuuuu

SEQ ID NO: 40550 - RNA, 20 nt, Artificial Sequence
  spacer sequence TTCN PAM
uuuuucuuucuuucuuuuuu

SEQ ID NO: 40551 - RNA, 20 nt, Artificial Sequence
  spacer sequence TTCN PAM
uucuuucuuuuuuuuuucua

SEQ ID NO: 40552 - RNA, 20 nt, Artificial Sequence
  spacer sequence TTCN PAM
uucuuuuuuuuuucuauuuu

SEQ ID NO: 40553 - RNA, 20 nt, Artificial Sequence
  spacer sequence TTCN PAM
uuuuuuuuucuauuuugaga

SEQ ID NO: 40554 - RNA, 20 nt, Artificial Sequence
  spacer sequence TTCN PAM
auuuugagacaggguuuugc

SEQ ID NO: 40555 - RNA, 20 nt, Artificial Sequence
  spacer sequence TTCN PAM
gugagccgagaucacaccac

SEQ ID NO: 40556 - RNA, 20 nt, Artificial Sequence
  spacer sequence TTCN PAM
aggguucugugagccgagau

SEQ ID NO: 40557 - RNA, 20 nt, Artificial Sequence
  spacer sequence TTCN PAM
agaccagccucaccaacgug

SEQ ID NO: 40558 - RNA, 20 nt, Artificial Sequence
  spacer sequence TTCN PAM
ccacguuggugaggcugguc

SEQ ID NO: 40559 - RNA, 20 nt, Artificial Sequence
  spacer sequence TTCN PAM
cuacuaaaaaaaaaaaacaa

SEQ ID NO: 40560 - RNA, 20 nt, Artificial Sequence
  spacer sequence TTCN PAM
ccugcaucagccucccgagu

SEQ ID NO: 40561 - RNA, 20 nt, Artificial Sequence
  spacer sequence TTCN PAM
agcgauucuccugcaucagc

SEQ ID NO: 40562 - RNA, 20 nt, Artificial Sequence
  spacer sequence TTCN PAM
cccagacuggagugcagugg

SEQ ID NO: 40563 - RNA, 20 nt, Artificial Sequence
  spacer sequence TTCN PAM
cuacaaacaagguuuauuua

SEQ ID NO: 40564 - RNA, 20 nt, Artificial Sequence
  spacer sequence TTCN PAM
agauuagccuggguaaccca

SEQ ID NO: 40565 - RNA, 20 nt, Artificial Sequence
  spacer sequence TTCN PAM
agugagcuucccaccucggu

SEQ ID NO: 40566 - RNA, 20 nt, Artificial Sequence
  spacer sequence TTCN PAM
caccucggucucccaaagug

SEQ ID NO: 40567 - RNA, 20 nt, Artificial Sequence
  spacer sequence TTCN PAM
ggccgggugcagcggcucac

SEQ ID NO: 40568 - RNA, 20 nt, Artificial Sequence
  spacer sequence TTCN PAM
uaucaggugcucauuaugag

SEQ ID NO: 40569 - RNA, 20 nt, Artificial Sequence
  spacer sequence TTCN PAM
guagcucaauccuggcucau

SEQ ID NO: 40570 - RNA, 20 nt, Artificial Sequence
  spacer sequence TTCN PAM
gcccguggcuccccaccgcc

SEQ ID NO: 40571 - RNA, 20 nt, Artificial Sequence
  spacer sequence TTCN PAM
uccgagaugaauuucucagu

SEQ ID NO: 40572 - RNA, 20 nt, Artificial Sequence
  spacer sequence TTCN PAM
ucucggaugaauacauggcc

SEQ ID NO: 40573 - RNA, 20 nt, Artificial Sequence
  spacer sequence TTCN PAM
cagugccacccagggccagg

SEQ ID NO: 40574 - RNA, 20 nt, Artificial Sequence
  spacer sequence TTCN PAM
cuguaguggcccuggcaccu

SEQ ID NO: 40575 - RNA, 20 nt, Artificial Sequence
  spacer sequence TTCN PAM
uggccuggggacccccucag

SEQ ID NO: 40576 - RNA, 20 nt, Artificial Sequence
  spacer sequence TTCN PAM
ucguggccuggggacccccu

SEQ ID NO: 40577 - RNA, 20 nt, Artificial Sequence
  spacer sequence TTCN PAM
caggcaggccccugccacgu

SEQ ID NO: 40578 - RNA, 20 nt, Artificial Sequence
  spacer sequence TTCN PAM
cccuccugggacccuugccc

SEQ ID NO: 40579 - RNA, 20 nt, Artificial Sequence
  spacer sequence TTCN PAM
uggaccuucaccucggaucc

SEQ ID NO: 40580 - RNA, 20 nt, Artificial Sequence
  spacer sequence TTCN PAM
ccucggauccgcugcccggc

SEQ ID NO: 40581 - RNA, 20 nt, Artificial Sequence
  spacer sequence TTCN PAM
cucggggccgggcagcggau

SEQ ID NO: 40582 - RNA, 20 nt, Artificial Sequence
  spacer sequence TTCN PAM
agagaagccagggccgcucc

SEQ ID NO: 40583 - RNA, 20 nt, Artificial Sequence
  spacer sequence TTCN PAM
cuggaauuucccucggggcc

SEQ ID NO: 40584 - RNA, 20 nt, Artificial Sequence
  spacer sequence TTCN PAM
aggugccaguagcacgggag

SEQ ID NO: 40585 - RNA, 20 nt, Artificial Sequence
  spacer sequence TTCN PAM
ccaaaugcccccaggcccuc

SEQ ID NO: 40586 - RNA, 20 nt, Artificial Sequence
  spacer sequence TTCN PAM
gcugcgucccacggggacuu

SEQ ID NO: 40587 - RNA, 20 nt, Artificial Sequence
  spacer sequence TTCN PAM
ccaaguccccgugggacgca

SEQ ID NO: 40588 - RNA, 20 nt, Artificial Sequence
  spacer sequence TTCN PAM
cucuuguugcccaggcaugg

SEQ ID NO: 40589 - RNA, 20 nt, Artificial Sequence
  spacer sequence TTCN PAM
gcucacugcaaccucagcuu

SEQ ID NO: 40590 - RNA, 20 nt, Artificial Sequence
  spacer sequence TTCN PAM
cggguucaagugauucuguc

SEQ ID NO: 40591 - RNA, 20 nt, Artificial Sequence
  spacer sequence TTCN PAM
agugauucugucgccucagc

SEQ ID NO: 40592 - RNA, 20 nt, Artificial Sequence
  spacer sequence TTCN PAM
gucgccucagccuccccagu

SEQ ID NO: 40593 - RNA, 20 nt, Artificial Sequence
  spacer sequence TTCN PAM
ccauguuggccaggcugguc

SEQ ID NO: 40594 - RNA, 20 nt, Artificial Sequence
  spacer sequence TTCN PAM
agaccagccuggccaacaug

SEQ ID NO: 40595 - RNA, 20 nt, Artificial Sequence
  spacer sequence TTCN PAM
cacuugugcccuguagaugc

SEQ ID NO: 40596 - RNA, 20 nt, Artificial Sequence
  spacer sequence TTCN PAM
aggaggugagaacugggggg

SEQ ID NO: 40597 - RNA, 20 nt, Artificial Sequence
  spacer sequence TTCN PAM
caccuccuagaacccagauu

SEQ ID NO: 40598 - RNA, 20 nt, Artificial Sequence
  spacer sequence TTCN PAM
cuucccugcaggccuucuca

SEQ ID NO: 40599 - RNA, 20 nt, Artificial Sequence
  spacer sequence TTCN PAM
cugcaggccuucucacgucc

SEQ ID NO: 40600 - RNA, 20 nt, Artificial Sequence
  spacer sequence TTCN PAM
cacguccacaggguugcaag

SEQ ID NO: 40601 - RNA, 20 nt, Artificial Sequence
  spacer sequence TTCN PAM
acucugccagucccgcuugc

SEQ ID NO: 40602 - RNA, 20 nt, Artificial Sequence
  spacer sequence TTCN PAM
caaagugcugggauuauagg

SEQ ID NO: 40603 - RNA, 20 nt, Artificial Sequence
  spacer sequence TTCN PAM
agaccagccuggccaacaug

SEQ ID NO: 40604 - RNA, 20 nt, Artificial Sequence
  spacer sequence TTCN PAM
ccauguuggccaggcugguc

SEQ ID NO: 40605 - RNA, 20 nt, Artificial Sequence
  spacer sequence TTCN PAM
ccagccucagccucccgagu

SEQ ID NO: 40606 - RNA, 20 nt, Artificial Sequence
  spacer sequence TTCN PAM
agcaauucuccagccucagc

SEQ ID NO: 40607 - RNA, 20 nt, Artificial Sequence
  spacer sequence TTCN PAM
cacacuccucuuuuguuuuu

SEQ ID NO: 40608 - RNA, 20 nt, Artificial Sequence
  spacer sequence TTCN PAM
cuacuuguucccacacuccu

SEQ ID NO: 40609 - RNA, 20 nt, Artificial Sequence
  spacer sequence TTCN PAM
accguucaaaucccgccacu

SEQ ID NO: 40610 - RNA, 20 nt, Artificial Sequence
  spacer sequence TTCN PAM
aaucccgccacucccccccg

SEQ ID NO: 40611 - RNA, 20 nt, Artificial Sequence
  spacer sequence TTCN PAM
ugaggucacagagccccggg

SEQ ID NO: 40612 - RNA, 20 nt, Artificial Sequence
  spacer sequence TTCN PAM
guuugcccaucuauaaaaug

SEQ ID NO: 40613 - RNA, 20 nt, Artificial Sequence
  spacer sequence TTCN PAM
aaaggagguaccacgauuau

SEQ ID NO: 40614 - RNA, 20 nt, Artificial Sequence
  spacer sequence TTCN PAM
cacaaaaggcuuccaaagga

SEQ ID NO: 40615 - RNA, 20 nt, Artificial Sequence
  spacer sequence TTCN PAM
gguauguguuaaguguuugg

SEQ ID NO: 40616 - RNA, 20 nt, Artificial Sequence
  spacer sequence TTCN PAM
ccauaccccaagccccacuc

SEQ ID NO: 40617 - RNA, 20 nt, Artificial Sequence
  spacer sequence TTCN PAM
uuuuuuuaauauaaacucuu

SEQ ID NO: 40618 - RNA, 20 nt, Artificial Sequence
  spacer sequence TTCN PAM
aguugggcauaguggugcac

SEQ ID NO: 40619 - RNA, 20 nt, Artificial Sequence
  spacer sequence TTCN PAM
ccauguuggccagguggauc

SEQ ID NO: 40620 - RNA, 20 nt, Artificial Sequence
  spacer sequence TTCN PAM
guagcugggacuauaggugu

SEQ ID NO: 40621 - RNA, 20 nt, Artificial Sequence
  spacer sequence TTCN PAM
ccugccucagccucuucagu

SEQ ID NO: 40622 - RNA, 20 nt, Artificial Sequence
  spacer sequence TTCN PAM
auagauucuccugccucagc

SEQ ID NO: 40623 - RNA, 20 nt, Artificial Sequence
  spacer sequence TTCN PAM
uguuuguuuuuuuuuuuuuu

SEQ ID NO: 40624 - RNA, 20 nt, Artificial Sequence
  spacer sequence TTCN PAM
gucagcugcaaccaaacgau

SEQ ID NO: 40625 - RNA, 20 nt, Artificial Sequence
  spacer sequence TTCN PAM
auuucugucagcugcaacca

SEQ ID NO: 40626 - RNA, 20 nt, Artificial Sequence
  spacer sequence TTCN PAM
uguuuuuuaaaaaggagcca

SEQ ID NO: 40627 - RNA, 20 nt, Artificial Sequence
  spacer sequence TTCN PAM
augagcaaaaaauuccuguu

SEQ ID NO: 40628 - RNA, 20 nt, Artificial Sequence
  spacer sequence TTCN PAM
guuccaugagcaaaaaauuc

SEQ ID NO: 40629 - RNA, 20 nt, Artificial Sequence
  spacer sequence TTCN PAM
ggaaaggaccauucacuagg

SEQ ID NO: 40630 - RNA, 20 nt, Artificial Sequence
  spacer sequence TTCN PAM
agaacaucaacggugcugag

SEQ ID NO: 40631 - RNA, 20 nt, Artificial Sequence
  spacer sequence TTCN PAM
cuagggugggggccguccug

SEQ ID NO: 40632 - RNA, 20 nt, Artificial Sequence
  spacer sequence TTCN PAM
gacacagcuggauccaggac

SEQ ID NO: 40633 - RNA, 20 nt, Artificial Sequence
  spacer sequence TTCN PAM
ccaucucuuagcauugccau

SEQ ID NO: 40634 - RNA, 20 nt, Artificial Sequence
  spacer sequence TTCN PAM
uuucuuuuccuuucuuuuuu

SEQ ID NO: 40635 - RNA, 20 nt, Artificial Sequence
  spacer sequence TTCN PAM
uuuccuuucuuuuuuuuuuu

SEQ ID NO: 40636 - RNA, 20 nt, Artificial Sequence
  spacer sequence TTCN PAM
uuucuuuuuuuuuuuuuuuu

SEQ ID NO: 40637 - RNA, 20 nt, Artificial Sequence
  spacer sequence TTCN PAM
uuuuuuuuuuuuuuuuuuuu

SEQ ID NO: 40638 - RNA, 20 nt, Artificial Sequence
  spacer sequence TTCN PAM
agugauucuccugccucagc

SEQ ID NO: 40639 - RNA, 20 nt, Artificial Sequence
  spacer sequence TTCN PAM
ccugccucagccucccgagu

SEQ ID NO: 40640 - RNA, 20 nt, Artificial Sequence
  spacer sequence TTCN PAM
agaccagacuggccaacaug

SEQ ID NO: 40641 - RNA, 20 nt, Artificial Sequence
  spacer sequence TTCN PAM
ucaacagacuuugccuuuau

SEQ ID NO: 40642 - RNA, 20 nt, Artificial Sequence
  spacer sequence TTCN PAM
acagacuuugccuuuauggg

SEQ ID NO: 40643 - RNA, 20 nt, Artificial Sequence
  spacer sequence TTCN PAM
ccauaaaggcaaagucuguu

SEQ ID NO: 40644 - RNA, 20 nt, Artificial Sequence
  spacer sequence TTCN PAM
caaggugggggcaccaaagu

SEQ ID NO: 40645 - RNA, 20 nt, Artificial Sequence
  spacer sequence TTCN PAM
cauucgcccagccuggguca

SEQ ID NO: 40646 - RNA, 20 nt, Artificial Sequence
  spacer sequence TTCN PAM
cccagccugggucacauguc

SEQ ID NO: 40647 - RNA, 20 nt, Artificial Sequence
  spacer sequence TTCN PAM
cccaauuggcucacuccaua

SEQ ID NO: 40648 - RNA, 20 nt, Artificial Sequence
  spacer sequence TTCN PAM
caccuguaaucccagcacuu

SEQ ID NO: 40649 - RNA, 20 nt, Artificial Sequence
  spacer sequence TTCN PAM
aacuuuggaaauucagugug

SEQ ID NO: 40650 - RNA, 20 nt, Artificial Sequence
  spacer sequence TTCN PAM
aaaguuagaaaaauuaaaaa

SEQ ID NO: 40651 - RNA, 20 nt, Artificial Sequence
  spacer sequence TTCN PAM
guguguagggcaggcauggu

SEQ ID NO: 40652 - RNA, 20 nt, Artificial Sequence
  spacer sequence TTCN PAM
gggauuacaggcaugaggca

SEQ ID NO: 40653 - RNA, 20 nt, Artificial Sequence
  spacer sequence TTCN PAM
ggaccagccugaacaauaug

SEQ ID NO: 40654 - RNA, 20 nt, Artificial Sequence
  spacer sequence TTCN PAM
ggcuggucccgaacuccuaa

SEQ ID NO: 40655 - RNA, 20 nt, Artificial Sequence
  spacer sequence TTCN PAM
ccauauuguucaggcugguc

SEQ ID NO: 40656 - RNA, 20 nt, Artificial Sequence
  spacer sequence TTCN PAM
auagagacaggguuucacca

SEQ ID NO: 40657 - RNA, 20 nt, Artificial Sequence
  spacer sequence TTCN PAM
ccugucucagccucuggagu

SEQ ID NO: 40658 - RNA, 20 nt, Artificial Sequence
  spacer sequence TTCN PAM
agcaauucuccugucucagc

SEQ ID NO: 40659 - RNA, 20 nt, Artificial Sequence
  spacer sequence TTCN PAM
cagauucaagcaauucuccu

SEQ ID NO: 40660 - RNA, 20 nt, Artificial Sequence
  spacer sequence TTCN PAM
cugcaaccucugcuucccag

SEQ ID NO: 40661 - RNA, 20 nt, Artificial Sequence
  spacer sequence TTCN PAM
cuccacacugacucucuuuu

SEQ ID NO: 40662 - RNA, 20 nt, Artificial Sequence
  spacer sequence TTCN PAM
ucagagucccacagagcacc

SEQ ID NO: 40663 - RNA, 20 nt, Artificial Sequence
  spacer sequence TTCN PAM
guccccauggguaaaggaca

SEQ ID NO: 40664 - RNA, 20 nt, Artificial Sequence
  spacer sequence TTCN PAM
cgcagaccugccaggaagag

SEQ ID NO: 40665 - RNA, 20 nt, Artificial Sequence
  spacer sequence TTCN PAM
uggcaggucugcgcgaagag

SEQ ID NO: 40666 - RNA, 20 nt, Artificial Sequence
  spacer sequence TTCN PAM
ugugcucuuccuggcagguc

SEQ ID NO: 40667 - RNA, 20 nt, Artificial Sequence
  spacer sequence TTCN PAM
ucuugugcucuuccuggcag

SEQ ID NO: 40668 - RNA, 20 nt, Artificial Sequence
  spacer sequence TTCN PAM
gucaauuucguggaauucuc

SEQ ID NO: 40669 - RNA, 20 nt, Artificial Sequence
  spacer sequence TTCN PAM
uggaauucuccaagaagugu

SEQ ID NO: 40670 - RNA, 20 nt, Artificial Sequence
  spacer sequence TTCN PAM
acgaaauugacagaagaguc

SEQ ID NO: 40671 - RNA, 20 nt, Artificial Sequence
  spacer sequence TTCN PAM
ccaagaaguguuuggagaga

SEQ ID NO: 40672 - RNA, 20 nt, Artificial Sequence
  spacer sequence TTCN PAM
uggagaauuccacgaaauug

SEQ ID NO: 40673 - RNA, 20 nt, Artificial Sequence
  spacer sequence TTCN PAM
aucucuccaaacacuucuug

SEQ ID NO: 40674 - RNA, 20 nt, Artificial Sequence
  spacer sequence TTCN PAM
ccuuugcagacguggucuuc

SEQ ID NO: 40675 - RNA, 20 nt, Artificial Sequence
  spacer sequence TTCN PAM
cuucuccuuugcagacgugg

SEQ ID NO: 40676 - RNA, 20 nt, Artificial Sequence
  spacer sequence TTCN PAM
aacuucacuucuccuuugca

SEQ ID NO: 40677 - RNA, 20 nt, Artificial Sequence
  spacer sequence TTCN PAM
cuucaaacuucacuucuccu

SEQ ID NO: 40678 - RNA, 20 nt, Artificial Sequence
  spacer sequence TTCN PAM
uccgaaauguaagaaagggu

SEQ ID NO: 40679 - RNA, 20 nt, Artificial Sequence
  spacer sequence TTCN PAM
gaggaauguaauuuuuaauc

SEQ ID NO: 40680 - RNA, 20 nt, Artificial Sequence
  spacer sequence TTCN PAM
uacauuucggaggaauguaa

SEQ ID NO: 40681 - RNA, 20 nt, Artificial Sequence
  spacer sequence TTCN PAM
uacccuuucuuacauuucgg

SEQ ID NO: 40682 - RNA, 20 nt, Artificial Sequence
  spacer sequence TTCN PAM
uuucuuacccuuucuuacau

SEQ ID NO: 40683 - RNA, 20 nt, Artificial Sequence
  spacer sequence TTCN PAM
uuccuuucuuacccuuucuu

SEQ ID NO: 40684 - RNA, 20 nt, Artificial Sequence
  spacer sequence TTCN PAM
aggagcauugcgauccuuuu

SEQ ID NO: 40685 - RNA, 20 nt, Artificial Sequence
  spacer sequence TTCN PAM
uccuguuuugcucugaacau

SEQ ID NO: 40686 - RNA, 20 nt, Artificial Sequence
  spacer sequence TTCN PAM
uguuuugcucugaacaucgc

SEQ ID NO: 40687 - RNA, 20 nt, Artificial Sequence
  spacer sequence TTCN PAM
gagcaaaacaggaagaaggc

SEQ ID NO: 40688 - RNA, 20 nt, Artificial Sequence
  spacer sequence TTCN PAM
acgacaaauaggccugggug

SEQ ID NO: 40689 - RNA, 20 nt, Artificial Sequence
  spacer sequence TTCN PAM
uugcaguuuccacgacaaau

SEQ ID NO: 40690 - RNA, 20 nt, Artificial Sequence
  spacer sequence TTCN PAM
cccaguuucuuugcaguuuc

SEQ ID NO: 40691 - RNA, 20 nt, Artificial Sequence
  spacer sequence TTCN PAM
gcucauaugguuguuuaucu

SEQ ID NO: 40692 - RNA, 20 nt, Artificial Sequence
  spacer sequence TTCN PAM
uaucucuccuguagcuuaac

SEQ ID NO: 40693 - RNA, 20 nt, Artificial Sequence
  spacer sequence TTCN PAM
cuuuugcccuuagcacgaua

SEQ ID NO: 40694 - RNA, 20 nt, Artificial Sequence
  spacer sequence TTCN PAM
ugcuucacuuuugcccuuag

SEQ ID NO: 40695 - RNA, 20 nt, Artificial Sequence
  spacer sequence TTCN PAM
uuccugcuucacuuuugccc

SEQ ID NO: 40696 - RNA, 20 nt, Artificial Sequence
  spacer sequence TTCN PAM
uugagcccuucuuuccugcu

SEQ ID NO: 40697 - RNA, 20 nt, Artificial Sequence
  spacer sequence TTCN PAM
ucuuugagcccuucuuuccu

SEQ ID NO: 40698 - RNA, 20 nt, Artificial Sequence
  spacer sequence TTCN PAM
gguuuguucuucuuugagcc

SEQ ID NO: 40699 - RNA, 20 nt, Artificial Sequence
  spacer sequence TTCN PAM
ccuccuccuccuccucaucu

SEQ ID NO: 40700 - RNA, 20 nt, Artificial Sequence
  spacer sequence TTCN PAM
uucuccuccuccuccuccuc

SEQ ID NO: 40701 - RNA, 20 nt, Artificial Sequence
  spacer sequence TTCN PAM
ucuucuuucuccuccuccuc

SEQ ID NO: 40702 - RNA, 20 nt, Artificial Sequence
  spacer sequence TTCN PAM
uccucaucuucaucuucuuu

SEQ ID NO: 40703 - RNA, 20 nt, Artificial Sequence
  spacer sequence TTCN PAM
cccucuuccuccucaucuuc

SEQ ID NO: 40704 - RNA, 20 nt, Artificial Sequence
  spacer sequence TTCN PAM
ucuucacccucuuccuccuc

SEQ ID NO: 40705 - RNA, 20 nt, Artificial Sequence
  spacer sequence TTCN PAM
ucaucuucacccucuuccuc

SEQ ID NO: 40706 - RNA, 20 nt, Artificial Sequence
  spacer sequence TTCN PAM
uagcaaaacaagcccacugc

SEQ ID NO: 40707 - RNA, 20 nt, Artificial Sequence
  spacer sequence TTCN PAM
cauucuuagcaaaacaagcc

SEQ ID NO: 40708 - RNA, 20 nt, Artificial Sequence
  spacer sequence TTCN PAM
aguacagcucaguauuagcu

SEQ ID NO: 40709 - RNA, 20 nt, Artificial Sequence
  spacer sequence TTCN PAM
guauaaaacuguacaaauuu

SEQ ID NO: 40710 - RNA, 20 nt, Artificial Sequence
  spacer sequence TTCN PAM
uauagcucauaagauucucu

SEQ ID NO: 40711 - RNA, 20 nt, Artificial Sequence
  spacer sequence TTCN PAM
cuguacagaaaauacuuuuc

SEQ ID NO: 40712 - RNA, 20 nt, Artificial Sequence
  spacer sequence TTCN PAM
guacagagaaucuuaugagc

SEQ ID NO: 40713 - RNA, 20 nt, Artificial Sequence
  spacer sequence TTCN PAM
uuucuuuucuuuuuuuugag

SEQ ID NO: 40714 - RNA, 20 nt, Artificial Sequence
  spacer sequence TTCN PAM
uuucuuuuuuuugagacaga

SEQ ID NO: 40715 - RNA, 20 nt, Artificial Sequence
  spacer sequence TTCN PAM
uuuuuuugagacagaguuuc

SEQ ID NO: 40716 - RNA, 20 nt, Artificial Sequence
  spacer sequence TTCN PAM
cucuuguugccuaggcugga

SEQ ID NO: 40717 - RNA, 20 nt, Artificial Sequence
  spacer sequence TTCN PAM
agcaguucuccugccucagc

SEQ ID NO: 40718 - RNA, 20 nt, Artificial Sequence
  spacer sequence TTCN PAM
ccugccucagccuccugagu

SEQ ID NO: 40719 - RNA, 20 nt, Artificial Sequence
  spacer sequence TTCN PAM
ccauguuggccaggcugcuu

SEQ ID NO: 40720 - RNA, 20 nt, Artificial Sequence
  spacer sequence TTCN PAM
aacuccugaccucgugaucc

SEQ ID NO: 40721 - RNA, 20 nt, Artificial Sequence
  spacer sequence TTCN PAM
gccucccaaaauacugggau

SEQ ID NO: 40722 - RNA, 20 nt, Artificial Sequence
  spacer sequence TTCN PAM
uacaagugugcugugcugcc

SEQ ID NO: 40723 - RNA, 20 nt, Artificial Sequence
  spacer sequence TTCN PAM
uuguuuuuuugauacgcaua

SEQ ID NO: 40724 - RNA, 20 nt, Artificial Sequence
  spacer sequence TTCN PAM
guguguaguucacacucaca

SEQ ID NO: 40725 - RNA, 20 nt, Artificial Sequence
  spacer sequence TTCN PAM
cacucacagcacaucuccgu

SEQ ID NO: 40726 - RNA, 20 nt, Artificial Sequence
  spacer sequence TTCN PAM
cucaagugccuggacggaga

SEQ ID NO: 40727 - RNA, 20 nt, Artificial Sequence
  spacer sequence TTCN PAM
uggaggagguggucuuugaa

SEQ ID NO: 40728 - RNA, 20 nt, Artificial Sequence
  spacer sequence TTCN PAM
aagaccaccuccuccaagaa

SEQ ID NO: 40729 - RNA, 20 nt, Artificial Sequence
  spacer sequence TTCN PAM
ccguucaaagaccaccuccu

SEQ ID NO: 40730 - RNA, 20 nt, Artificial Sequence
  spacer sequence TTCN PAM
aggauucugucuguaauggu

SEQ ID NO: 40731 - RNA, 20 nt, Artificial Sequence
  spacer sequence TTCN PAM
gucuguaauggucaccaagu

SEQ ID NO: 40732 - RNA, 20 nt, Artificial Sequence
  spacer sequence TTCN PAM
ugagucacuuccaugugucc

SEQ ID NO: 40733 - RNA, 20 nt, Artificial Sequence
  spacer sequence TTCN PAM
auguguccugcaguucucug

SEQ ID NO: 40734 - RNA, 20 nt, Artificial Sequence
  spacer sequence TTCN PAM
cugaaggggcgugggaccua

SEQ ID NO: 40735 - RNA, 20 nt, Artificial Sequence
  spacer sequence TTCN PAM
gagaacugcaggacacaugg

SEQ ID NO: 40736 - RNA, 20 nt, Artificial Sequence
  spacer sequence TTCN PAM
aagaaguuggggugugagcc

SEQ ID NO: 40737 - RNA, 20 nt, Artificial Sequence
  spacer sequence TTCN PAM
uggaaucuggagauaaugcu

SEQ ID NO: 40738 - RNA, 20 nt, Artificial Sequence
  spacer sequence TTCN PAM
guacugauugcuggcucaca

SEQ ID NO: 40739 - RNA, 20 nt, Artificial Sequence
  spacer sequence TTCN PAM
uucaacuucaguuuucugga

SEQ ID NO: 40740 - RNA, 20 nt, Artificial Sequence
  spacer sequence TTCN PAM
acuucaguuuucuggaagag

SEQ ID NO: 40741 - RNA, 20 nt, Artificial Sequence
  spacer sequence TTCN PAM
guuuucuggaagagaucuuu

SEQ ID NO: 40742 - RNA, 20 nt, Artificial Sequence
  spacer sequence TTCN PAM
ggaagagaucuuuuuuuuuu

SEQ ID NO: 40743 - RNA, 20 nt, Artificial Sequence
  spacer sequence TTCN PAM
agaaaacugaaguugaagga

SEQ ID NO: 40744 - RNA, 20 nt, Artificial Sequence
  spacer sequence TTCN PAM
cucuuauugcccaagcugga

SEQ ID NO: 40745 - RNA, 20 nt, Artificial Sequence
  spacer sequence TTCN PAM
agcgauucuccucccucagc

SEQ ID NO: 40746 - RNA, 20 nt, Artificial Sequence
  spacer sequence TTCN PAM
ccucccucagccuucugagu

SEQ ID NO: 40747 - RNA, 20 nt, Artificial Sequence
  spacer sequence TTCN PAM
gaguagcugggauuacagac

SEQ ID NO: 40748 - RNA, 20 nt, Artificial Sequence
  spacer sequence TTCN PAM
acuaaaaauacaaaaauuag

SEQ ID NO: 40749 - RNA, 20 nt, Artificial Sequence
  spacer sequence TTCN PAM
ccugccucagccuccccagu

SEQ ID NO: 40750 - RNA, 20 nt, Artificial Sequence
  spacer sequence TTCN PAM
agcgauucuccugccucagc

SEQ ID NO: 40751 - RNA, 20 nt, Artificial Sequence
  spacer sequence TTCN PAM
agcuaaacaaccuggcgcua

SEQ ID NO: 40752 - RNA, 20 nt, Artificial Sequence
  spacer sequence TTCN PAM
ugcacuagcgccagguuguu

SEQ ID NO: 40753 - RNA, 20 nt, Artificial Sequence
  spacer sequence TTCN PAM
accuuuuccugcacuagcgc

SEQ ID NO: 40754 - RNA, 20 nt, Artificial Sequence
  spacer sequence TTCN PAM
auauuuucaaccuuaucaag

SEQ ID NO: 40755 - RNA, 20 nt, Artificial Sequence
  spacer sequence TTCN PAM
accuuaucaagccauauuuu

SEQ ID NO: 40756 - RNA, 20 nt, Artificial Sequence
  spacer sequence TTCN PAM
cgagaagcccccgcugggcu

SEQ ID NO: 40757 - RNA, 20 nt, Artificial Sequence
  spacer sequence TTCN PAM
cgugaaaaacaagaguugcc

SEQ ID NO: 40758 - RNA, 20 nt, Artificial Sequence
  spacer sequence TTCN PAM
cccaugaguuccgauagggc

SEQ ID NO: 40759 - RNA, 20 nt, Artificial Sequence
  spacer sequence TTCN PAM
gauagggcagaggccgcccu

SEQ ID NO: 40760 - RNA, 20 nt, Artificial Sequence
  spacer sequence TTCN PAM
cuuuccccugguccaagagu

SEQ ID NO: 40761 - RNA, 20 nt, Artificial Sequence
  spacer sequence TTCN PAM
ccugguccaagaguggcuca

SEQ ID NO: 40762 - RNA, 20 nt, Artificial Sequence
  spacer sequence TTCN PAM
uuugagccacucuuggacca

SEQ ID NO: 40763 - RNA, 20 nt, Artificial Sequence
  spacer sequence TTCN PAM
agucaaaaauccuucuuuug

SEQ ID NO: 40764 - RNA, 20 nt, Artificial Sequence
  spacer sequence TTCN PAM
agguccgcaagcccagguuc

SEQ ID NO: 40765 - RNA, 20 nt, Artificial Sequence
  spacer sequence TTCN PAM
cgcccaccgggcucagccca

SEQ ID NO: 40766 - RNA, 20 nt, Artificial Sequence
  spacer sequence TTCN PAM
gggaggccguuggcacccgu

SEQ ID NO: 40767 - RNA, 20 nt, Artificial Sequence
  spacer sequence TTCN PAM
cgagccccaccgaggucaca

SEQ ID NO: 40768 - RNA, 20 nt, Artificial Sequence
  spacer sequence TTCN PAM
cgcccccugcccgugacggg

SEQ ID NO: 40769 - RNA, 20 nt, Artificial Sequence
  spacer sequence TTCN PAM
accaacgggugggcacgucg

SEQ ID NO: 40770 - RNA, 20 nt, Artificial Sequence
  spacer sequence TTCN PAM
gcgcccgacacgccgccgcc

SEQ ID NO: 40771 - RNA, 20 nt, Artificial Sequence
  spacer sequence TTCN PAM
ccgccccgcgccucacucgc

SEQ ID NO: 40772 - RNA, 20 nt, Artificial Sequence
  spacer sequence TTCN PAM
ggaaccccccggcccggagc

SEQ ID NO: 40773 - RNA, 20 nt, Artificial Sequence
  spacer sequence TTCN PAM
cgaaggugccgggccccggg

SEQ ID NO: 40774 - RNA, 20 nt, Artificial Sequence
  spacer sequence TTCN PAM
gggggcugggggcguccggg

SEQ ID NO: 40775 - RNA, 20 nt, Artificial Sequence
  spacer sequence TTCN PAM
cugggggcgucuccggcgac

SEQ ID NO: 40776 - RNA, 20 nt, Artificial Sequence
  spacer sequence TTCN PAM
ccgggccgcccaucccacag

SEQ ID NO: 40777 - RNA, 20 nt, Artificial Sequence
  spacer sequence TTCN PAM
uacuuguccgugggccugag

SEQ ID NO: 40778 - RNA, 20 nt, Artificial Sequence
  spacer sequence TTCN PAM
gugcuaggucauccuccggg

SEQ ID NO: 40779 - RNA, 20 nt, Artificial Sequence
  spacer sequence TTCN PAM
uccucggggacccuggggag

SEQ ID NO: 40780 - RNA, 20 nt, Artificial Sequence
  spacer sequence TTCN PAM
gaggcccgggucccacugga

SEQ ID NO: 40781 - RNA, 20 nt, Artificial Sequence
  spacer sequence TTCN PAM
agugggacccgggccucaga

SEQ ID NO: 40782 - RNA, 20 nt, Artificial Sequence
  spacer sequence TTCN PAM
acacgucagucccggcugcg

SEQ ID NO: 40783 - RNA, 20 nt, Artificial Sequence
  spacer sequence TTCN PAM
guuggaagaaggguuuuucc

SEQ ID NO: 40784 - RNA, 20 nt, Artificial Sequence
  spacer sequence TTCN PAM
aacagaaacgauuguucuac

SEQ ID NO: 40785 - RNA, 20 nt, Artificial Sequence
  spacer sequence TTCN PAM
uccaacagaaacgauuguuc

SEQ ID NO: 40786 - RNA, 20 nt, Artificial Sequence
  spacer sequence TTCN PAM
cuuccuuuugggguuuuugu

SEQ ID NO: 40787 - RNA, 20 nt, Artificial Sequence
  spacer sequence TTCN PAM
uuuugggguuuuuguugccu

SEQ ID NO: 40788 - RNA, 20 nt, Artificial Sequence
  spacer sequence TTCN PAM
uuuuucuuuguaaaauuuug

SEQ ID NO: 40789 - RNA, 20 nt, Artificial Sequence
  spacer sequence TTCN PAM
uuguaaaauuuuggagaagg

SEQ ID NO: 40790 - RNA, 20 nt, Artificial Sequence
  spacer sequence TTCN PAM
ccaaaauuuuacaaagaaaa

SEQ ID NO: 40791 - RNA, 20 nt, Artificial Sequence
  spacer sequence TTCN PAM
cuucuccaaaauuuuacaaa

SEQ ID NO: 40792 - RNA, 20 nt, Artificial Sequence
  spacer sequence TTCN PAM
gacuucccuucuccaaaauu

SEQ ID NO: 40793 - RNA, 20 nt, Artificial Sequence
  spacer sequence TTCN PAM
uuguguuccgacuucccuuc

SEQ ID NO: 40794 - RNA, 20 nt, Artificial Sequence
  spacer sequence TTCN PAM
cggagggcgagcugaugucg

SEQ ID NO: 40795 - RNA, 20 nt, Artificial Sequence
  spacer sequence TTCN PAM
uccaccgcaucgacuccacc

SEQ ID NO: 40796 - RNA, 20 nt, Artificial Sequence
  spacer sequence TTCN PAM
cccagcaggucccccaucag

SEQ ID NO: 40797 - RNA, 20 nt, Artificial Sequence
  spacer sequence TTCN PAM
ccuugccguaagagccuucc

SEQ ID NO: 40798 - RNA, 20 nt, Artificial Sequence
  spacer sequence TTCN PAM
ugaggaucuugacggcccuc

SEQ ID NO: 40799 - RNA, 20 nt, Artificial Sequence
  spacer sequence TTCN PAM
ucuugaggaucuugacggcc

SEQ ID NO: 40800 - RNA, 20 nt, Artificial Sequence
  spacer sequence TTCN PAM
ucuucuugaggaucuugacg

SEQ ID NO: 40801 - RNA, 20 nt, Artificial Sequence
  spacer sequence TTCN PAM
caacuucuucuucuugagga

SEQ ID NO: 40802 - RNA, 20 nt, Artificial Sequence
  spacer sequence TTCN PAM
cguuggccuccccguugggg

SEQ ID NO: 40803 - RNA, 20 nt, Artificial Sequence
  spacer sequence TTCN PAM
ucacguuggccuccccguug

SEQ ID NO: 40804 - RNA, 20 nt, Artificial Sequence
  spacer sequence TTCN PAM
gucuuccuuccuucucuccu

SEQ ID NO: 40805 - RNA, 20 nt, Artificial Sequence
  spacer sequence TTCN PAM
uuccuucucuccucccuccc

SEQ ID NO: 40806 - RNA, 20 nt, Artificial Sequence
  spacer sequence TTCN PAM
uucucuccucccucccuccc

SEQ ID NO: 40807 - RNA, 20 nt, Artificial Sequence
  spacer sequence TTCN PAM
cuccucccucccucccuuac

SEQ ID NO: 40808 - RNA, 20 nt, Artificial Sequence
  spacer sequence TTCN PAM
ucuuaacacccugagcugga

SEQ ID NO: 40809 - RNA, 20 nt, Artificial Sequence
  spacer sequence TTCN PAM
cucaggcaaggccaguuguc

SEQ ID NO: 40810 - RNA, 20 nt, Artificial Sequence
  spacer sequence TTCN PAM
cuaccagggcauuuuaacug

SEQ ID NO: 40811 - RNA, 20 nt, Artificial Sequence
  spacer sequence TTCN PAM
caggaggguuucgcuaccag

SEQ ID NO: 40812 - RNA, 20 nt, Artificial Sequence
  spacer sequence TTCN PAM
acugggcgccucugcuccuu

SEQ ID NO: 40813 - RNA, 20 nt, Artificial Sequence
  spacer sequence TTCN PAM
gcgcaguguguggccguuac

SEQ ID NO: 40814 - RNA, 20 nt, Artificial Sequence
  spacer sequence TTCN PAM
ccuggccccgguaacggcca

SEQ ID NO: 40815 - RNA, 20 nt, Artificial Sequence
  spacer sequence TTCN PAM
ccucugacaggauaaacaaa

SEQ ID NO: 40816 - RNA, 20 nt, Artificial Sequence
  spacer sequence TTCN PAM
cuccugcugacugauaagcc

SEQ ID NO: 40817 - RNA, 20 nt, Artificial Sequence
  spacer sequence TTCN PAM
ucauuugccagggaugugac

SEQ ID NO: 40818 - RNA, 20 nt, Artificial Sequence
  spacer sequence TTCN PAM
agcgucacaucccuggcaaa

SEQ ID NO: 40819 - RNA, 20 nt, Artificial Sequence
  spacer sequence TTCN PAM
agccccgggggccagggaug

SEQ ID NO: 40820 - RNA, 20 nt, Artificial Sequence
  spacer sequence TTCN PAM
ggagggaggcacaguccccc

SEQ ID NO: 40821 - RNA, 20 nt, Artificial Sequence
  spacer sequence TTCN PAM
ggaugcaauucgggagggag

SEQ ID NO: 40822 - RNA, 20 nt, Artificial Sequence
  spacer sequence TTCN PAM
aacugacuucuucaggcacg

SEQ ID NO: 40823 - RNA, 20 nt, Artificial Sequence
  spacer sequence TTCN PAM
ucaggcacggggcugccgcu

SEQ ID NO: 40824 - RNA, 20 nt, Artificial Sequence
  spacer sequence TTCN PAM
ggcacggggcugccgcuggg

SEQ ID NO: 40825 - RNA, 20 nt, Artificial Sequence
  spacer sequence TTCN PAM
ccgcgcacagaugcagaggc

SEQ ID NO: 40826 - RNA, 20 nt, Artificial Sequence
  spacer sequence TTCN PAM
cagccuucuuaacuuucaaa

SEQ ID NO: 40827 - RNA, 20 nt, Artificial Sequence
  spacer sequence TTCN PAM
uaacuuucaaaacuuugccu

SEQ ID NO: 40828 - RNA, 20 nt, Artificial Sequence
  spacer sequence TTCN PAM
aaacuuugccuccuguuucc

SEQ ID NO: 40829 - RNA, 20 nt, Artificial Sequence
  spacer sequence TTCN PAM
aagaaaggaccuuaucugcu

SEQ ID NO: 40830 - RNA, 20 nt, Artificial Sequence
  spacer sequence TTCN PAM
uggaaacaggaggcaaaguu

SEQ ID NO: 40831 - RNA, 20 nt, Artificial Sequence
  spacer sequence TTCN PAM
aaggucauggugcccugcgc

SEQ ID NO: 40832 - RNA, 20 nt, Artificial Sequence
  spacer sequence TTCN PAM
uccugcucaggggcccuggg

SEQ ID NO: 40833 - RNA, 20 nt, Artificial Sequence
  spacer sequence TTCN PAM
ccaggcuggagugcaguggc

SEQ ID NO: 40834 - RNA, 20 nt, Artificial Sequence
  spacer sequence TTCN PAM
cgccacugcacuccagccug

SEQ ID NO: 40835 - RNA, 20 nt, Artificial Sequence
  spacer sequence TTCN PAM
ugccauucuccugccucagc

SEQ ID NO: 40836 - RNA, 20 nt, Artificial Sequence
  spacer sequence TTCN PAM
ccugccucagccucccgagu

SEQ ID NO: 40837 - RNA, 20 nt, Artificial Sequence
  spacer sequence TTCN PAM
guagagacgggguuucaccg

SEQ ID NO: 40838 - RNA, 20 nt, Artificial Sequence
  spacer sequence TTCN PAM
ccguguuagccaggaugguc

SEQ ID NO: 40839 - RNA, 20 nt, Artificial Sequence
  spacer sequence TTCN PAM
cucuuguugcucaggcugga

SEQ ID NO: 40840 - RNA, 20 nt, Artificial Sequence
  spacer sequence TTCN PAM
agugauucucgugccucagc

SEQ ID NO: 40841 - RNA, 20 nt, Artificial Sequence
  spacer sequence TTCN PAM
cgugccucagccucccgagu

SEQ ID NO: 40842 - RNA, 20 nt, Artificial Sequence
  spacer sequence TTCN PAM
ccaucuuggccagguugguc

SEQ ID NO: 40843 - RNA, 20 nt, Artificial Sequence
  spacer sequence TTCN PAM
agaccaaccuggccaagaug

SEQ ID NO: 40844 - RNA, 20 nt, Artificial Sequence
  spacer sequence TTCN PAM
gaccucgugauccaccugcc

SEQ ID NO: 40845 - RNA, 20 nt, Artificial Sequence
  spacer sequence TTCN PAM
uaaucagcaugcaggcugug

SEQ ID NO: 40846 - RNA, 20 nt, Artificial Sequence
  spacer sequence TTCN PAM
gcaugucacagccugcaugc

SEQ ID NO: 40847 - RNA, 20 nt, Artificial Sequence
  spacer sequence TTCN PAM
gagccugugccccugguuuc

SEQ ID NO: 40848 - RNA, 20 nt, Artificial Sequence
  spacer sequence TTCN PAM
cagccgcucccauuuaaccc

SEQ ID NO: 40849 - RNA, 20 nt, Artificial Sequence
  spacer sequence TTCN PAM
acgaggccuuucugaugucu

SEQ ID NO: 40850 - RNA, 20 nt, Artificial Sequence
  spacer sequence TTCN PAM
gaugucucagugcccagucu

SEQ ID NO: 40851 - RNA, 20 nt, Artificial Sequence
  spacer sequence TTCN PAM
acccggguccagacugggca

SEQ ID NO: 40852 - RNA, 20 nt, Artificial Sequence
  spacer sequence TTCN PAM
cacugcugggagagagacug

SEQ ID NO: 40853 - RNA, 20 nt, Artificial Sequence
  spacer sequence TTCN PAM
agaccagccuggccaacaug

SEQ ID NO: 40854 - RNA, 20 nt, Artificial Sequence
  spacer sequence TTCN PAM
ccauguuggccaggcugguc

SEQ ID NO: 40855 - RNA, 20 nt, Artificial Sequence
  spacer sequence TTCN PAM
gccucagccucccgaguagc

SEQ ID NO: 40856 - RNA, 20 nt, Artificial Sequence
  spacer sequence TTCN PAM
cauugacccugcauauacau

SEQ ID NO: 40857 - RNA, 20 nt, Artificial Sequence
  spacer sequence TTCN PAM
acccuccagcgucugucuuc

SEQ ID NO: 40858 - RNA, 20 nt, Artificial Sequence
  spacer sequence TTCN PAM
ugaacagucaguggaggagg

SEQ ID NO: 40859 - RNA, 20 nt, Artificial Sequence
  spacer sequence TTCN PAM
ggaaagcagggggcucacuc

SEQ ID NO: 40860 - RNA, 20 nt, Artificial Sequence
  spacer sequence TTCN PAM
ggugcucaccugagcuccca

SEQ ID NO: 40861 - RNA, 20 nt, Artificial Sequence
  spacer sequence TTCN PAM
ugccugucuccaccaagacc

SEQ ID NO: 40862 - RNA, 20 nt, Artificial Sequence
  spacer sequence TTCN PAM
ugcaaccuucuugccugucu

SEQ ID NO: 40863 - RNA, 20 nt, Artificial Sequence
  spacer sequence TTCN PAM
cccaggcacugggccagacu

SEQ ID NO: 40864 - RNA, 20 nt, Artificial Sequence
  spacer sequence TTCN PAM
cucccguucucccaggcacu

SEQ ID NO: 40865 - RNA, 20 nt, Artificial Sequence
  spacer sequence TTCN PAM
aggcaguggggucaagcugu

SEQ ID NO: 40866 - RNA, 20 nt, Artificial Sequence
  spacer sequence TTCN PAM
gcguccaauuucauccuggc

SEQ ID NO: 40867 - RNA, 20 nt, Artificial Sequence
  spacer sequence TTCN PAM
uccuggcccugaguguguaa

SEQ ID NO: 40868 - RNA, 20 nt, Artificial Sequence
  spacer sequence TTCN PAM
uggucacugucugccaucag

SEQ ID NO: 40869 - RNA, 20 nt, Artificial Sequence
  spacer sequence TTCN PAM
ggagccacugcauuuccucc

SEQ ID NO: 40870 - RNA, 20 nt, Artificial Sequence
  spacer sequence TTCN PAM
uccagcccccugggugcugc

SEQ ID NO: 40871 - RNA, 20 nt, Artificial Sequence
  spacer sequence TTCN PAM
gggagcugguguguucugac

SEQ ID NO: 40872 - RNA, 20 nt, Artificial Sequence
  spacer sequence TTCN PAM
gacuggaggcugccaugugc

SEQ ID NO: 40873 - RNA, 20 nt, Artificial Sequence
  spacer sequence TTCN PAM
ccuugacagcacucugcaca

SEQ ID NO: 40874 - RNA, 20 nt, Artificial Sequence
  spacer sequence TTCN PAM
cugcagcgcuggcagcaagg

SEQ ID NO: 40875 - RNA, 20 nt, Artificial Sequence
  spacer sequence TTCN PAM
cacacacaaaggaggcuuuu

SEQ ID NO: 40876 - RNA, 20 nt, Artificial Sequence
  spacer sequence TTCN PAM
agacacucgcugcgagacac

SEQ ID NO: 40877 - RNA, 20 nt, Artificial Sequence
  spacer sequence TTCN PAM
agacaagccucaggcguccg

SEQ ID NO: 40878 - RNA, 20 nt, Artificial Sequence
  spacer sequence TTCN PAM
acaccaacuggaggaccgga

SEQ ID NO: 40879 - RNA, 20 nt, Artificial Sequence
  spacer sequence TTCN PAM
cuuccuucccagaaaggcag

SEQ ID NO: 40880 - RNA, 20 nt, Artificial Sequence
  spacer sequence TTCN PAM
uucccagaaaggcagcccug

SEQ ID NO: 40881 - RNA, 20 nt, Artificial Sequence
  spacer sequence TTCN PAM
cagaaaggcagcccuggagu

SEQ ID NO: 40882 - RNA, 20 nt, Artificial Sequence
  spacer sequence TTCN PAM
gggaaggaagggaagagacg

SEQ ID NO: 40883 - RNA, 20 nt, Artificial Sequence
  spacer sequence TTCN PAM
aauaagauuauacuuuuugc

SEQ ID NO: 40884 - RNA, 20 nt, Artificial Sequence
  spacer sequence TTCN PAM
uauuucuaauaagauuauac

SEQ ID NO: 40885 - RNA, 20 nt, Artificial Sequence
  spacer sequence TTCN PAM
aaaaagcaucaaugaguuaa

SEQ ID NO: 40886 - RNA, 20 nt, Artificial Sequence
  spacer sequence TTCN PAM
gucaugccuguaaucccagc

SEQ ID NO: 40887 - RNA, 20 nt, Artificial Sequence
  spacer sequence TTCN PAM
ccauguuggucaggcuaacu

SEQ ID NO: 40888 - RNA, 20 nt, Artificial Sequence
  spacer sequence TTCN PAM
aagggagggggccccgccgu

SEQ ID NO: 40889 - RNA, 20 nt, Artificial Sequence
  spacer sequence TTCN PAM
ugggggcuuccaagggaggg

SEQ ID NO: 40890 - RNA, 20 nt, Artificial Sequence
  spacer sequence TTCN PAM
cuccgggagucacguuuucc

SEQ ID NO: 40891 - RNA, 20 nt, Artificial Sequence
  spacer sequence TTCN PAM
cagccucccaguggacgugg

SEQ ID NO: 40892 - RNA, 20 nt, Artificial Sequence
  spacer sequence TTCN PAM
uggggcagcccugguauggc

SEQ ID NO: 40893 - RNA, 20 nt, Artificial Sequence
  spacer sequence TTCN PAM
caucccaccgacgugggccc

SEQ ID NO: 40894 - RNA, 20 nt, Artificial Sequence
  spacer sequence TTCN PAM
gggaaguugcccuuggguug

SEQ ID NO: 40895 - RNA, 20 nt, Artificial Sequence
  spacer sequence TTCN PAM
cugaagcccagggcccacgu

SEQ ID NO: 40896 - RNA, 20 nt, Artificial Sequence
  spacer sequence TTCN PAM
gagaggagucugcccagccu

SEQ ID NO: 40897 - RNA, 20 nt, Artificial Sequence
  spacer sequence TTCN PAM
gcuguggucccaggcccucu

SEQ ID NO: 40898 - RNA, 20 nt, Artificial Sequence
  spacer sequence TTCN PAM
ggccucggacuccaccagca

SEQ ID NO: 40899 - RNA, 20 nt, Artificial Sequence
  spacer sequence TTCN PAM
cuccucugguccaugcugga

SEQ ID NO: 40900 - RNA, 20 nt, Artificial Sequence
  spacer sequence TTCN PAM
ccccccccuaggcggcccag

SEQ ID NO: 40901 - RNA, 20 nt, Artificial Sequence
  spacer sequence TTCN PAM
guagauggaggugcuagggg

SEQ ID NO: 40902 - RNA, 20 nt, Artificial Sequence
  spacer sequence TTCN PAM
ggccagcccgcccccugcuc

SEQ ID NO: 40903 - RNA, 20 nt, Artificial Sequence
  spacer sequence TTCN PAM
cgcacccccgccccuuucug

SEQ ID NO: 40904 - RNA, 20 nt, Artificial Sequence
  spacer sequence TTCN PAM
uccaguacauugcccgggcg

SEQ ID NO: 40905 - RNA, 20 nt, Artificial Sequence
  spacer sequence TTCN PAM
agcggcagcgggcagccagu

SEQ ID NO: 40906 - RNA, 20 nt, Artificial Sequence
  spacer sequence TTCN PAM
cccaagcggcaccacuucca

SEQ ID NO: 40907 - RNA, 20 nt, Artificial Sequence
  spacer sequence TTCN PAM
guguguguguggagcgggug

SEQ ID NO: 40908 - RNA, 20 nt, Artificial Sequence
  spacer sequence TTCN PAM
guguguggggggggcccagg

SEQ ID NO: 40909 - RNA, 20 nt, Artificial Sequence
  spacer sequence TTCN PAM
auguguguguaugggggcca

SEQ ID NO: 40910 - RNA, 20 nt, Artificial Sequence
  spacer sequence TTCN PAM
gugguggggggcacaggcgu

SEQ ID NO: 40911 - RNA, 20 nt, Artificial Sequence
  spacer sequence TTCN PAM
guggggggggcacaggcgug

SEQ ID NO: 40912 - RNA, 20 nt, Artificial Sequence
  spacer sequence TTCN PAM
guggggggggcacaggcaug

SEQ ID NO: 40913 - RNA, 20 nt, Artificial Sequence
  spacer sequence TTCN PAM
guguguaggaggguacaggc

SEQ ID NO: 40914 - RNA, 20 nt, Artificial Sequence
  spacer sequence TTCN PAM
caccuguacuccagggugua

SEQ ID NO: 40915 - RNA, 20 nt, Artificial Sequence
  spacer sequence TTCN PAM
cuccgugccucaguuuucuc

SEQ ID NO: 40916 - RNA, 20 nt, Artificial Sequence
  spacer sequence TTCN PAM
uggcccugcccugcucaggc

SEQ ID NO: 40917 - RNA, 20 nt, Artificial Sequence
  spacer sequence TTCN PAM
acucacucgcuuccuggccc

SEQ ID NO: 40918 - RNA, 20 nt, Artificial Sequence
  spacer sequence TTCN PAM
gccaggcugugcaggccacc

SEQ ID NO: 40919 - RNA, 20 nt, Artificial Sequence
  spacer sequence TTCN PAM
guaguuucagccaggcugug

SEQ ID NO: 40920 - RNA, 20 nt, Artificial Sequence
  spacer sequence TTCN PAM
cccaacagccuccccagcaa

SEQ ID NO: 40921 - RNA, 20 nt, Artificial Sequence
  spacer sequence TTCN PAM
gggaugugcugcaaccacau

SEQ ID NO: 40922 - RNA, 20 nt, Artificial Sequence
  spacer sequence TTCN PAM
uuucaagaucuggauucucu

SEQ ID NO: 40923 - RNA, 20 nt, Artificial Sequence
  spacer sequence TTCN PAM
agaucuggauucucucagcu

SEQ ID NO: 40924 - RNA, 20 nt, Artificial Sequence
  spacer sequence TTCN PAM
cucagcuggagcggggcagc

SEQ ID NO: 40925 - RNA, 20 nt, Artificial Sequence
  spacer sequence TTCN PAM
ccucccuggccccuagcuac

SEQ ID NO: 40926 - RNA, 20 nt, Artificial Sequence
  spacer sequence TTCN PAM
cccagcccccacccccaagg

SEQ ID NO: 40927 - RNA, 20 nt, Artificial Sequence
  spacer sequence TTCN PAM
cucugcacuuguccccuauc

SEQ ID NO: 40928 - RNA, 20 nt, Artificial Sequence
  spacer sequence TTCN PAM
gcaggccuugggucaggcag

SEQ ID NO: 40929 - RNA, 20 nt, Artificial Sequence
  spacer sequence TTCN PAM
auucugcaggccuuggguca

SEQ ID NO: 40930 - RNA, 20 nt, Artificial Sequence
  spacer sequence TTCN PAM
guaaguuuuacuggcacaca

SEQ ID NO: 40931 - RNA, 20 nt, Artificial Sequence
  spacer sequence TTCN PAM
ucaugcagcgccucugacug

SEQ ID NO: 40932 - RNA, 20 nt, Artificial Sequence
  spacer sequence TTCN PAM
ucgccucaacagcagcagag

SEQ ID NO: 40933 - RNA, 20 nt, Artificial Sequence
  spacer sequence TTCN PAM
ugggguuauggucagagagg

SEQ ID NO: 40934 - RNA, 20 nt, Artificial Sequence
  spacer sequence TTCN PAM
caucaggccccggauggugg

SEQ ID NO: 40935 - RNA, 20 nt, Artificial Sequence
  spacer sequence TTCN PAM
uguuagaggaagucagagcc

SEQ ID NO: 40936 - RNA, 20 nt, Artificial Sequence
  spacer sequence TTCN PAM
ucuaacacgaaguaaguguu

SEQ ID NO: 40937 - RNA, 20 nt, Artificial Sequence
  spacer sequence TTCN PAM
cccggggccccucccucgcc

SEQ ID NO: 40938 - RNA, 20 nt, Artificial Sequence
  spacer sequence TTCN PAM
acucacauucccagggauga

SEQ ID NO: 40939 - RNA, 20 nt, Artificial Sequence
  spacer sequence TTCN PAM
cagggaugagagccgagcau

SEQ ID NO: 40940 - RNA, 20 nt, Artificial Sequence
  spacer sequence TTCN PAM
cgcacagguucccggagcug

SEQ ID NO: 40941 - RNA, 20 nt, Artificial Sequence
  spacer sequence TTCN PAM
cggagcugggugggucuggc

SEQ ID NO: 40942 - RNA, 20 nt, Artificial Sequence
  spacer sequence TTCN PAM
gcagguggcugggagggcug

SEQ ID NO: 40943 - RNA, 20 nt, Artificial Sequence
  spacer sequence TTCN PAM
acuucuugaccuugaaauag

SEQ ID NO: 40944 - RNA, 20 nt, Artificial Sequence
  spacer sequence TTCN PAM
ugaccuugaaauaggggcug

SEQ ID NO: 40945 - RNA, 20 nt, Artificial Sequence
  spacer sequence TTCN PAM
aggucaagaaguggaagcug

SEQ ID NO: 40946 - RNA, 20 nt, Artificial Sequence
  spacer sequence TTCN PAM
ucacccgccugcgccgccau

SEQ ID NO: 40947 - RNA, 20 nt, Artificial Sequence
  spacer sequence TTCN PAM
gcaguuccucacccgccugc

SEQ ID NO: 40948 - RNA, 20 nt, Artificial Sequence
  spacer sequence TTCN PAM
cugccaguuggaugccggua

SEQ ID NO: 40949 - RNA, 20 nt, Artificial Sequence
  spacer sequence TTCN PAM
uccugggcccgugugcuggc

SEQ ID NO: 40950 - RNA, 20 nt, Artificial Sequence
  spacer sequence TTCN PAM
ugggcccgugugcuggcccc

SEQ ID NO: 40951 - RNA, 20 nt, Artificial Sequence
  spacer sequence TTCN PAM
gccccucuccgagcagguac

SEQ ID NO: 40952 - RNA, 20 nt, Artificial Sequence
  spacer sequence TTCN PAM
ccagagggcagagcaccuua

SEQ ID NO: 40953 - RNA, 20 nt, Artificial Sequence
  spacer sequence TTCN PAM
cuccaaaccccauauccagg

SEQ ID NO: 40954 - RNA, 20 nt, Artificial Sequence
  spacer sequence TTCN PAM
agacacgcaccuccuuuucu

SEQ ID NO: 40955 - RNA, 20 nt, Artificial Sequence
  spacer sequence TTCN PAM
ggagagggugcgccaccccu

SEQ ID NO: 40956 - RNA, 20 nt, Artificial Sequence
  spacer sequence TTCN PAM
cuagguucuggagagggugc

SEQ ID NO: 40957 - RNA, 20 nt, Artificial Sequence
  spacer sequence TTCN PAM
cccgugugcaaugacccggc

SEQ ID NO: 40958 - RNA, 20 nt, Artificial Sequence
  spacer sequence TTCN PAM
ccucccuguccccaguccag

SEQ ID NO: 40959 - RNA, 20 nt, Artificial Sequence
  spacer sequence TTCN PAM
ccagagucgcuagaugccga

SEQ ID NO: 40960 - RNA, 20 nt, Artificial Sequence
  spacer sequence TTCN PAM
gaacuggggaggagggcccu

SEQ ID NO: 40961 - RNA, 20 nt, Artificial Sequence
  spacer sequence TTCN PAM
gaaugcagcccacagccacc

SEQ ID NO: 40962 - RNA, 20 nt, Artificial Sequence
  spacer sequence TTCN PAM
uccccacagggcccuccucc

SEQ ID NO: 40963 - RNA, 20 nt, Artificial Sequence
  spacer sequence TTCN PAM
ccugcaggagccacugcaga

SEQ ID NO: 40964 - RNA, 20 nt, Artificial Sequence
  spacer sequence TTCN PAM
cugcaggagcaggagcccac

SEQ ID NO: 40965 - RNA, 20 nt, Artificial Sequence
  spacer sequence TTCN PAM
uccgagugcuugcccugccc

SEQ ID NO: 40966 - RNA, 20 nt, Artificial Sequence
  spacer sequence TTCN PAM
cgagccggcugcaccgccuu

SEQ ID NO: 40967 - RNA, 20 nt, Artificial Sequence
  spacer sequence TTCN PAM
ugggguggggguagcccccc

SEQ ID NO: 40968 - RNA, 20 nt, Artificial Sequence
  spacer sequence TTCN PAM
gcuacacccuggcagggccc

SEQ ID NO: 40969 - RNA, 20 nt, Artificial Sequence
  spacer sequence TTCN PAM
uugucccuugcacucccacc

SEQ ID NO: 40970 - RNA, 20 nt, Artificial Sequence
  spacer sequence TTCN PAM
cagccccggagaagcugguu

SEQ ID NO: 40971 - RNA, 20 nt, Artificial Sequence
  spacer sequence TTCN PAM
ccggggcugggaacagaugc

SEQ ID NO: 40972 - RNA, 20 nt, Artificial Sequence
  spacer sequence TTCN PAM
cauggcgacugcggagcagg

SEQ ID NO: 40973 - RNA, 20 nt, Artificial Sequence
  spacer sequence TTCN PAM
cgcccgcccccccgaggccg

SEQ ID NO: 40974 - RNA, 20 nt, Artificial Sequence
  spacer sequence TTCN PAM
cccgagcguaaggcggccgg

SEQ ID NO: 40975 - RNA, 20 nt, Artificial Sequence
  spacer sequence TTCN PAM
cuggugccgcgccccgccuc

SEQ ID NO: 40976 - RNA, 20 nt, Artificial Sequence
  spacer sequence TTCN PAM
cgggccuccccacccggcug

SEQ ID NO: 40977 - RNA, 20 nt, Artificial Sequence
  spacer sequence TTCN PAM
cggagcgagaggagcgcaca

SEQ ID NO: 40978 - RNA, 20 nt, Artificial Sequence
  spacer sequence TTCN PAM
cggacuuccgcccacacgcg

SEQ ID NO: 40979 - RNA, 20 nt, Artificial Sequence
  spacer sequence TTCN PAM
gcccacacgcgacagcggga

SEQ ID NO: 40980 - RNA, 20 nt, Artificial Sequence
  spacer sequence TTCN PAM
cgcugucgcgugugggcgga

SEQ ID NO: 40981 - RNA, 20 nt, Artificial Sequence
  spacer sequence TTCN PAM
cccaguaccagggcccgggc

SEQ ID NO: 40982 - RNA, 20 nt, Artificial Sequence
  spacer sequence TTCN PAM
cgaccuacauaugcggcccc

SEQ ID NO: 40983 - RNA, 20 nt, Artificial Sequence
  spacer sequence TTCN PAM
ggcuggaggggguggggaca

SEQ ID NO: 40984 - RNA, 20 nt, Artificial Sequence
  spacer sequence TTCN PAM
ccggccuccggucaccaucc

SEQ ID NO: 40985 - RNA, 20 nt, Artificial Sequence
  spacer sequence TTCN PAM
ccucggccuccugccaucuu

SEQ ID NO: 40986 - RNA, 20 nt, Artificial Sequence
  spacer sequence TTCN PAM
ccacggggcagcaccgcgcc

SEQ ID NO: 40987 - RNA, 20 nt, Artificial Sequence
  spacer sequence TTCN PAM
cccugugaggucgggcgagg

SEQ ID NO: 40988 - RNA, 20 nt, Artificial Sequence
  spacer sequence TTCN PAM
ccgccugcuccgcggccacc

SEQ ID NO: 40989 - RNA, 20 nt, Artificial Sequence
  spacer sequence TTCN PAM
uaaauucuccgccugcuccg

SEQ ID NO: 40990 - RNA, 20 nt, Artificial Sequence
  spacer sequence TTCN PAM
cuuccggcggggcggggggc

SEQ ID NO: 40991 - RNA, 20 nt, Artificial Sequence
  spacer sequence TTCN PAM
ggcggggcggggggcggagc

SEQ ID NO: 40992 - RNA, 20 nt, Artificial Sequence
  spacer sequence TTCN PAM
ccucgcccgguccugagguc

SEQ ID NO: 40993 - RNA, 20 nt, Artificial Sequence
  spacer sequence TTCN PAM
aggacacccccagcugcguc

SEQ ID NO: 40994 - RNA, 20 nt, Artificial Sequence
  spacer sequence TTCN PAM
cgacucugcagcccgaggug

SEQ ID NO: 40995 - RNA, 20 nt, Artificial Sequence
  spacer sequence TTCN PAM
ggggcggcacagccagggcc

SEQ ID NO: 40996 - RNA, 20 nt, Artificial Sequence
  spacer sequence TTCN PAM
ccuuuaagcugcacagccca

SEQ ID NO: 40997 - RNA, 20 nt, Artificial Sequence
  spacer sequence TTCN PAM
ccacgcagguccccucuggc

SEQ ID NO: 40998 - RNA, 20 nt, Artificial Sequence
  spacer sequence TTCN PAM
gaugucaccccacgaggagc

SEQ ID NO: 40999 - RNA, 20 nt, Artificial Sequence
  spacer sequence TTCN PAM
gcgggugucguucugauguc

SEQ ID NO: 41000 - RNA, 20 nt, Artificial Sequence
  spacer sequence TTCN PAM
cccucuuagaccaucgaacc

SEQ ID NO: 41001 - RNA, 20 nt, Artificial Sequence
  spacer sequence TTCN PAM
auggucuaagagggagaagc

SEQ ID NO: 41002 - RNA, 20 nt, Artificial Sequence
  spacer sequence TTCN PAM
cgucccaaagaaaggcugac

SEQ ID NO: 41003 - RNA, 20 nt, Artificial Sequence
  spacer sequence TTCN PAM
uugggacgagaaagaggagg

SEQ ID NO: 41004 - RNA, 20 nt, Artificial Sequence
  spacer sequence TTCN PAM
ccccgguuuccuucaacucc

SEQ ID NO: 41005 - RNA, 20 nt, Artificial Sequence
  spacer sequence TTCN PAM
uucaacuccuuccccagcuu

SEQ ID NO: 41006 - RNA, 20 nt, Artificial Sequence
  spacer sequence TTCN PAM
acuccuuccccagcuucaca

SEQ ID NO: 41007 - RNA, 20 nt, Artificial Sequence
  spacer sequence TTCN PAM
ccagcuucacagucucggcg

SEQ ID NO: 41008 - RNA, 20 nt, Artificial Sequence
  spacer sequence TTCN PAM
cagucucggcgcuucugcuc

SEQ ID NO: 41009 - RNA, 20 nt, Artificial Sequence
  spacer sequence TTCN PAM
gcucuuggcuuccagcccau

SEQ ID NO: 41010 - RNA, 20 nt, Artificial Sequence
  spacer sequence TTCN PAM
agcccaugccuggguccccu

SEQ ID NO: 41011 - RNA, 20 nt, Artificial Sequence
  spacer sequence TTCN PAM
ugugugcuguggggccacca

SEQ ID NO: 41012 - RNA, 20 nt, Artificial Sequence
  spacer sequence TTCN PAM
cagcuaucggagugguggcc

SEQ ID NO: 41013 - RNA, 20 nt, Artificial Sequence
  spacer sequence TTCN PAM
cuggggcugcccuuggaguu

SEQ ID NO: 41014 - RNA, 20 nt, Artificial Sequence
  spacer sequence TTCN PAM
cauuugccuggcaccagguu

SEQ ID NO: 41015 - RNA, 20 nt, Artificial Sequence
  spacer sequence TTCN PAM
caggcauugacuugcaaacu

SEQ ID NO: 41016 - RNA, 20 nt, Artificial Sequence
  spacer sequence TTCN PAM
uucacaggcauugacuugca

SEQ ID NO: 41017 - RNA, 20 nt, Artificial Sequence
  spacer sequence TTCN PAM
cugcuuccuucacaggcauu

SEQ ID NO: 41018 - RNA, 20 nt, Artificial Sequence
  spacer sequence TTCN PAM
cagcaggaccaugacauggg

SEQ ID NO: 41019 - RNA, 20 nt, Artificial Sequence
  spacer sequence TTCN PAM
ggguuuuuuguauuucgguu

SEQ ID NO: 41020 - RNA, 20 nt, Artificial Sequence
  spacer sequence TTCN PAM
guuuugcuuuuuggagagac

SEQ ID NO: 41021 - RNA, 20 nt, Artificial Sequence
  spacer sequence TTCN PAM
agcaauuuuccagccucagc

SEQ ID NO: 41022 - RNA, 20 nt, Artificial Sequence
  spacer sequence TTCN PAM
agccucagcccggaagguag

SEQ ID NO: 41023 - RNA, 20 nt, Artificial Sequence
  spacer sequence TTCN PAM
gggcugaggcuggaaaauug

SEQ ID NO: 41024 - RNA, 20 nt, Artificial Sequence
  spacer sequence TTCN PAM
aucucuacaaaaaaaaacaa

SEQ ID NO: 41025 - RNA, 20 nt, Artificial Sequence
  spacer sequence TTCN PAM
agaccagcccggacaacaua

SEQ ID NO: 41026 - RNA, 20 nt, Artificial Sequence
  spacer sequence TTCN PAM
gggcucaagagauccuucug

SEQ ID NO: 41027 - RNA, 20 nt, Artificial Sequence
  spacer sequence TTCN PAM
gucucagucuccuaaauugu

SEQ ID NO: 41028 - RNA, 20 nt, Artificial Sequence
  spacer sequence TTCN PAM
gauuuuuaauaaagacuccc

SEQ ID NO: 41029 - RNA, 20 nt, Artificial Sequence
  spacer sequence TTCN PAM
cacagccagagggagucuuu

SEQ ID NO: 41030 - RNA, 20 nt, Artificial Sequence
  spacer sequence TTCN PAM
ucacacagccagagggaguc

SEQ ID NO: 41031 - RNA, 20 nt, Artificial Sequence
  spacer sequence TTCN PAM
gcccugucccggccugugca

SEQ ID NO: 41032 - RNA, 20 nt, Artificial Sequence
  spacer sequence TTCN PAM
agaggaaccccagguuuggg

SEQ ID NO: 41033 - RNA, 20 nt, Artificial Sequence
  spacer sequence TTCN PAM
ucuggaauuccgcccugucc

SEQ ID NO: 41034 - RNA, 20 nt, Artificial Sequence
  spacer sequence TTCN PAM
cuccaguccccacuccaggg

SEQ ID NO: 41035 - RNA, 20 nt, Artificial Sequence
  spacer sequence TTCN PAM
acgagugagacugagucuau

SEQ ID NO: 41036 - RNA, 20 nt, Artificial Sequence
  spacer sequence TTCN PAM
uggaguggcagcuggauaug

SEQ ID NO: 41037 - RNA, 20 nt, Artificial Sequence
  spacer sequence TTCN PAM
agucgugaccugugcaccuc

SEQ ID NO: 41038 - RNA, 20 nt, Artificial Sequence
  spacer sequence TTCN PAM
cuuuucgagucgugaccugu

SEQ ID NO: 41039 - RNA, 20 nt, Artificial Sequence
  spacer sequence TTCN PAM
uccugagucggaccagcagg

SEQ ID NO: 41040 - RNA, 20 nt, Artificial Sequence
  spacer sequence TTCN PAM
ucaggugcuuggguuccagg

SEQ ID NO: 41041 - RNA, 20 nt, Artificial Sequence
  spacer sequence TTCN PAM
ggugcuuggguuccagggga

SEQ ID NO: 41042 - RNA, 20 nt, Artificial Sequence
  spacer sequence TTCN PAM
aggggacaguggcgcccgcc

SEQ ID NO: 41043 - RNA, 20 nt, Artificial Sequence
  spacer sequence TTCN PAM
ggccagugcaauggcgggcg

SEQ ID NO: 41044 - RNA, 20 nt, Artificial Sequence
  spacer sequence TTCN PAM
cccacagcaggaggcauugg

SEQ ID NO: 41045 - RNA, 20 nt, Artificial Sequence
  spacer sequence TTCN PAM
agggagcccgagccccaacc

SEQ ID NO: 41046 - RNA, 20 nt, Artificial Sequence
  spacer sequence TTCN PAM
gcauuuucccggagccuaag

SEQ ID NO: 41047 - RNA, 20 nt, Artificial Sequence
  spacer sequence TTCN PAM
cggagccuaaggagcggggc

SEQ ID NO: 41048 - RNA, 20 nt, Artificial Sequence
  spacer sequence TTCN PAM
uagaacagcugcaccugcag

SEQ ID NO: 41049 - RNA, 20 nt, Artificial Sequence
  spacer sequence TTCN PAM
aggaaacggcgaccgcggcg

SEQ ID NO: 41050 - RNA, 20 nt, Artificial Sequence
  spacer sequence TTCN PAM
acccugucccguccugcaca

SEQ ID NO: 41051 - RNA, 20 nt, Artificial Sequence
  spacer sequence TTCN PAM
cggcuuuuacugugauuuau

SEQ ID NO: 41052 - RNA, 20 nt, Artificial Sequence
  spacer sequence TTCN PAM
agcuauucuccugccucagc

SEQ ID NO: 41053 - RNA, 20 nt, Artificial Sequence
  spacer sequence TTCN PAM
ccugccucagccucccgagu

SEQ ID NO: 41054 - RNA, 20 nt, Artificial Sequence
  spacer sequence TTCN PAM
ccauguugaccaggcugguu

SEQ ID NO: 41055 - RNA, 20 nt, Artificial Sequence
  spacer sequence TTCN PAM
aacuccugaccucaggugau

SEQ ID NO: 41056 - RNA, 20 nt, Artificial Sequence
  spacer sequence TTCN PAM
agcacuuuauccgaucugga

SEQ ID NO: 41057 - RNA, 20 nt, Artificial Sequence
  spacer sequence TTCN PAM
cacucuguugcccaggcuag

SEQ ID NO: 41058 - RNA, 20 nt, Artificial Sequence
  spacer sequence TTCN PAM
ccugccuuggccucucaagg

SEQ ID NO: 41059 - RNA, 20 nt, Artificial Sequence
  spacer sequence TTCN PAM
ggcucugggccagguguggu

SEQ ID NO: 41060 - RNA, 20 nt, Artificial Sequence
  spacer sequence TTCN PAM
ugaugucuauccagggcccu

SEQ ID NO: 41061 - RNA, 20 nt, Artificial Sequence
  spacer sequence TTCN PAM
agcuccuggccucaagugau

SEQ ID NO: 41062 - RNA, 20 nt, Artificial Sequence
  spacer sequence TTCN PAM
gcugcgugguggcucacgac

SEQ ID NO: 41063 - RNA, 20 nt, Artificial Sequence
  spacer sequence TTCN PAM
agauucggcugcgugguggc

SEQ ID NO: 41064 - RNA, 20 nt, Artificial Sequence
  spacer sequence TTCN PAM
cugaaguucguuuuacucca

SEQ ID NO: 41065 - RNA, 20 nt, Artificial Sequence
  spacer sequence TTCN PAM
gugaaauucaagauucggcu

SEQ ID NO: 41066 - RNA, 20 nt, Artificial Sequence
  spacer sequence TTCN PAM
uuuuacuccaccucccagga

SEQ ID NO: 41067 - RNA, 20 nt, Artificial Sequence
  spacer sequence TTCN PAM
ccgcccuuaucugaccaccc

SEQ ID NO: 41068 - RNA, 20 nt, Artificial Sequence
  spacer sequence TTCN PAM
gccgcagcccgggccggaac

SEQ ID NO: 41069 - RNA, 20 nt, Artificial Sequence
  spacer sequence TTCN PAM
ggcccgggcugcggcagaac

SEQ ID NO: 41070 - RNA, 20 nt, Artificial Sequence
  spacer sequence TTCN PAM
ggggguugcaguuuuguucc

SEQ ID NO: 41071 - RNA, 20 nt, Artificial Sequence
  spacer sequence TTCN PAM
cgcuugcgcucucgccggga

SEQ ID NO: 41072 - RNA, 20 nt, Artificial Sequence
  spacer sequence TTCN PAM
ugccgcccgccgcugccaug

SEQ ID NO: 41073 - RNA, 20 nt, Artificial Sequence
  spacer sequence TTCN PAM
ccuucgccucucccacgcag

SEQ ID NO: 41074 - RNA, 20 nt, Artificial Sequence
  spacer sequence TTCN PAM
ccucucccacgcagguucgg

SEQ ID NO: 41075 - RNA, 20 nt, Artificial Sequence
  spacer sequence TTCN PAM
ggcgcugcgggucgggaccc

SEQ ID NO: 41076 - RNA, 20 nt, Artificial Sequence
  spacer sequence TTCN PAM
gggcccccggacccgcgcgc

SEQ ID NO: 41077 - RNA, 20 nt, Artificial Sequence
  spacer sequence TTCN PAM
ggggcgcgcggguccggggg

SEQ ID NO: 41078 - RNA, 20 nt, Artificial Sequence
  spacer sequence TTCN PAM
cauuucgcggaucaguagaa

SEQ ID NO: 41079 - RNA, 20 nt, Artificial Sequence
  spacer sequence TTCN PAM
cggaucaguagaaugaggcg

SEQ ID NO: 41080 - RNA, 20 nt, Artificial Sequence
  spacer sequence TTCN PAM
acugauccgcgaaaugggaa

SEQ ID NO: 41081 - RNA, 20 nt, Artificial Sequence
  spacer sequence TTCN PAM
gaucccugcgcuggguuguc

SEQ ID NO: 41082 - RNA, 20 nt, Artificial Sequence
  spacer sequence TTCN PAM
ccacgcuguugucugcaggu

SEQ ID NO: 41083 - RNA, 20 nt, Artificial Sequence
  spacer sequence TTCN PAM
ucaacggugccaacguccgg

SEQ ID NO: 41084 - RNA, 20 nt, Artificial Sequence
  spacer sequence TTCN PAM
acggugccaacguccggcag

SEQ ID NO: 41085 - RNA, 20 nt, Artificial Sequence
  spacer sequence TTCN PAM
gcauccuggcggcccacgug

SEQ ID NO: 41086 - RNA, 20 nt, Artificial Sequence
  spacer sequence TTCN PAM
cgcagccucaacugagacgg

SEQ ID NO: 41087 - RNA, 20 nt, Artificial Sequence
  spacer sequence TTCN PAM
gaccucaggugauccaccug

SEQ ID NO: 41088 - RNA, 20 nt, Artificial Sequence
  spacer sequence TTCN PAM
gagaccagccuggccaacau

SEQ ID NO: 41089 - RNA, 20 nt, Artificial Sequence
  spacer sequence TTCN PAM
aaaaauacagaaaacuggcc

SEQ ID NO: 41090 - RNA, 20 nt, Artificial Sequence
  spacer sequence TTCN PAM
guauuuuuagaagagacggg

SEQ ID NO: 41091 - RNA, 20 nt, Artificial Sequence
  spacer sequence TTCN PAM
ccguguuagccaggaugguc

SEQ ID NO: 41092 - RNA, 20 nt, Artificial Sequence
  spacer sequence TTCN PAM
cucuuguugcccaggcugga

SEQ ID NO: 41093 - RNA, 20 nt, Artificial Sequence
  spacer sequence TTCN PAM
uauuugagauggaguuucac

SEQ ID NO: 41094 - RNA, 20 nt, Artificial Sequence
  spacer sequence TTCN PAM
ucaccggccagcccaggcuc

SEQ ID NO: 41095 - RNA, 20 nt, Artificial Sequence
  spacer sequence TTCN PAM
cuuucaucaccggccagccc

SEQ ID NO: 41096 - RNA, 20 nt, Artificial Sequence
  spacer sequence TTCN PAM
accauccuacauugguuggu

SEQ ID NO: 41097 - RNA, 20 nt, Artificial Sequence
  spacer sequence TTCN PAM
ugccuguaaucucagcacuu

SEQ ID NO: 41098 - RNA, 20 nt, Artificial Sequence
  spacer sequence TTCN PAM
gucucccaaagugcugagau

SEQ ID NO: 41099 - RNA, 20 nt, Artificial Sequence
  spacer sequence TTCN PAM
cccacuucagucucccaaag

SEQ ID NO: 41100 - RNA, 20 nt, Artificial Sequence
  spacer sequence TTCN PAM
uuuuauuuuuuguagagaca

SEQ ID NO: 41101 - RNA, 20 nt, Artificial Sequence
  spacer sequence TTCN PAM
aaagugcuaggauuacaggu

SEQ ID NO: 41102 - RNA, 20 nt, Artificial Sequence
  spacer sequence TTCN PAM
cuauguugcccaggcugguc

SEQ ID NO: 41103 - RNA, 20 nt, Artificial Sequence
  spacer sequence TTCN PAM
gccucccgaguagcugggac

SEQ ID NO: 41104 - RNA, 20 nt, Artificial Sequence
  spacer sequence TTCN PAM
gccggggaagucaaggcugc

SEQ ID NO: 41105 - RNA, 20 nt, Artificial Sequence
  spacer sequence TTCN PAM
ccggcugaagcgguccucuu

SEQ ID NO: 41106 - RNA, 20 nt, Artificial Sequence
  spacer sequence TTCN PAM
gccugagcaacaagagugag

SEQ ID NO: 41107 - RNA, 20 nt, Artificial Sequence
  spacer sequence TTCN PAM
uccccuaaucugaucagccc

SEQ ID NO: 41108 - RNA, 20 nt, Artificial Sequence
  spacer sequence TTCN PAM
ugcacaaaugaccuuccucc

SEQ ID NO: 41109 - RNA, 20 nt, Artificial Sequence
  spacer sequence TTCN PAM
aagccucacugguuuccagu

SEQ ID NO: 41110 - RNA, 20 nt, Artificial Sequence
  spacer sequence TTCN PAM
agugguggccagauuugaac

SEQ ID NO: 41111 - RNA, 20 nt, Artificial Sequence
  spacer sequence TTCN PAM
aaucuggccaccacuggaaa

SEQ ID NO: 41112 - RNA, 20 nt, Artificial Sequence
  spacer sequence TTCN PAM
uccagcuucuaguccuuucu

SEQ ID NO: 41113 - RNA, 20 nt, Artificial Sequence
  spacer sequence TTCN PAM
aguccuuucuugcggccccu

SEQ ID NO: 41114 - RNA, 20 nt, Artificial Sequence
  spacer sequence TTCN PAM
ugcggccccuguuuuguucu

SEQ ID NO: 41115 - RNA, 20 nt, Artificial Sequence
  spacer sequence TTCN PAM
ucucuagcaguugcccgcca

SEQ ID NO: 41116 - RNA, 20 nt, Artificial Sequence
  spacer sequence TTCN PAM
cuagcaguugcccgccaugu

SEQ ID NO: 41117 - RNA, 20 nt, Artificial Sequence
  spacer sequence TTCN PAM
cagggggcucuggacuugac

SEQ ID NO: 41118 - RNA, 20 nt, Artificial Sequence
  spacer sequence TTCN PAM
ccccgccccauucccccagu

SEQ ID NO: 41119 - RNA, 20 nt, Artificial Sequence
  spacer sequence TTCN PAM
cccagugagcagcgguucca

SEQ ID NO: 41120 - RNA, 20 nt, Artificial Sequence
  spacer sequence TTCN PAM
aucgcagugaacgccgacuc

SEQ ID NO: 41121 - RNA, 20 nt, Artificial Sequence
  spacer sequence TTCN PAM
cugcgauggaaccgcugcuc

SEQ ID NO: 41122 - RNA, 20 nt, Artificial Sequence
  spacer sequence TTCN PAM
gugcaguuguuggccgaaga

SEQ ID NO: 41123 - RNA, 20 nt, Artificial Sequence
  spacer sequence TTCN PAM
gccaacaacugcaccgaaga

SEQ ID NO: 41124 - RNA, 20 nt, Artificial Sequence
  spacer sequence TTCN PAM
ccaaguuugccuuggcugcc

SEQ ID NO: 41125 - RNA, 20 nt, Artificial Sequence
  spacer sequence TTCN PAM
gaucuggaucucugcccgcg

SEQ ID NO: 41126 - RNA, 20 nt, Artificial Sequence
  spacer sequence TTCN PAM
ccagggccucguuggccucg

SEQ ID NO: 41127 - RNA, 20 nt, Artificial Sequence
  spacer sequence TTCN PAM
ccagguggccgggaccccag

SEQ ID NO: 41128 - RNA, 20 nt, Artificial Sequence
  spacer sequence TTCN PAM
gccugggccccaggcccugc

SEQ ID NO: 41129 - RNA, 20 nt, Artificial Sequence
  spacer sequence TTCN PAM
acacaggcagggccuggggc

SEQ ID NO: 41130 - RNA, 20 nt, Artificial Sequence
  spacer sequence TTCN PAM
cuggcccaguccccagagcu

SEQ ID NO: 41131 - RNA, 20 nt, Artificial Sequence
  spacer sequence TTCN PAM
gccucucaagauccccccag

SEQ ID NO: 41132 - RNA, 20 nt, Artificial Sequence
  spacer sequence TTCN PAM
gagccaccucuggaugaacu

SEQ ID NO: 41133 - RNA, 20 nt, Artificial Sequence
  spacer sequence TTCN PAM
uccagagguggcuccgaagc

SEQ ID NO: 41134 - RNA, 20 nt, Artificial Sequence
  spacer sequence TTCN PAM
gggucuuuaauggggcgggg

SEQ ID NO: 41135 - RNA, 20 nt, Artificial Sequence
  spacer sequence TTCN PAM
uccaccuggcccggugaagc

SEQ ID NO: 41136 - RNA, 20 nt, Artificial Sequence
  spacer sequence TTCN PAM
ccgggccagguggaggaaca

SEQ ID NO: 41137 - RNA, 20 nt, Artificial Sequence
  spacer sequence TTCN PAM
uacggaccuccaggugcccu

SEQ ID NO: 41138 - RNA, 20 nt, Artificial Sequence
  spacer sequence TTCN PAM
cccuacaacgguggggaggg

SEQ ID NO: 41139 - RNA, 20 nt, Artificial Sequence
  spacer sequence TTCN PAM
cccuccccaccguuguaggg

SEQ ID NO: 41140 - RNA, 20 nt, Artificial Sequence
  spacer sequence TTCN PAM
uggucuccaggccuugaccc

SEQ ID NO: 41141 - RNA, 20 nt, Artificial Sequence
  spacer sequence TTCN PAM
agaggcuggugggcagggcc

SEQ ID NO: 41142 - RNA, 20 nt, Artificial Sequence
  spacer sequence TTCN PAM
gcacccggccaggcagggcc

SEQ ID NO: 41143 - RNA, 20 nt, Artificial Sequence
  spacer sequence TTCN PAM
ggguuggccccagauggagu

SEQ ID NO: 41144 - RNA, 20 nt, Artificial Sequence
  spacer sequence TTCN PAM
ccuuuccauaacccuggggg

SEQ ID NO: 41145 - RNA, 20 nt, Artificial Sequence
  spacer sequence TTCN PAM
auaacccugggggcgggcaa

SEQ ID NO: 41146 - RNA, 20 nt, Artificial Sequence
  spacer sequence TTCN PAM
uugggacagggcccugugca

SEQ ID NO: 41147 - RNA, 20 nt, Artificial Sequence
  spacer sequence TTCN PAM
cugccuaccccacugcacag

SEQ ID NO: 41148 - RNA, 20 nt, Artificial Sequence
  spacer sequence TTCN PAM
aggggggugaguggggaggg

SEQ ID NO: 41149 - RNA, 20 nt, Artificial Sequence
  spacer sequence TTCN PAM
cuugaggcgaggugccguug

SEQ ID NO: 41150 - RNA, 20 nt, Artificial Sequence
  spacer sequence TTCN PAM
ggaacagcccacgguccccu

SEQ ID NO: 41151 - RNA, 20 nt, Artificial Sequence
  spacer sequence TTCN PAM
agaauaccugaucugcugac

SEQ ID NO: 41152 - RNA, 20 nt, Artificial Sequence
  spacer sequence TTCN PAM
ccaggaauccgcagcccagg

SEQ ID NO: 41153 - RNA, 20 nt, Artificial Sequence
  spacer sequence TTCN PAM
uggagaagugggggccuggu

SEQ ID NO: 41154 - RNA, 20 nt, Artificial Sequence
  spacer sequence TTCN PAM
cugggcugcggauuccugga

SEQ ID NO: 41155 - RNA, 20 nt, Artificial Sequence
  spacer sequence TTCN PAM
agccccaggucuucaaguuc

SEQ ID NO: 41156 - RNA, 20 nt, Artificial Sequence
  spacer sequence TTCN PAM
aguuccugccaggccaccag

SEQ ID NO: 41157 - RNA, 20 nt, Artificial Sequence
  spacer sequence TTCN PAM
ugccaggccaccaggacccu

SEQ ID NO: 41158 - RNA, 20 nt, Artificial Sequence
  spacer sequence TTCN PAM
cacccucccugguggugggg

SEQ ID NO: 41159 - RNA, 20 nt, Artificial Sequence
  spacer sequence TTCN PAM
cuccgagugucaggugucuc

SEQ ID NO: 41160 - RNA, 20 nt, Artificial Sequence
  spacer sequence TTCN PAM
cggccccacccugacugccu

SEQ ID NO: 41161 - RNA, 20 nt, Artificial Sequence
  spacer sequence TTCN PAM
gugagggcagccccuggcuu

SEQ ID NO: 41162 - RNA, 20 nt, Artificial Sequence
  spacer sequence TTCN PAM
gccucacuaagccaggggcu

SEQ ID NO: 41163 - RNA, 20 nt, Artificial Sequence
  spacer sequence TTCN PAM
ugggugugauggggacaaac

SEQ ID NO: 41164 - RNA, 20 nt, Artificial Sequence
  spacer sequence TTCN PAM
cauacucggcguccccaugg

SEQ ID NO: 41165 - RNA, 20 nt, Artificial Sequence
  spacer sequence TTCN PAM
ccaccauuucccauacucgg

SEQ ID NO: 41166 - RNA, 20 nt, Artificial Sequence
  spacer sequence TTCN PAM
uuuagacuggcucugggcau

SEQ ID NO: 41167 - RNA, 20 nt, Artificial Sequence
  spacer sequence TTCN PAM
caggggccacuguguggccc

SEQ ID NO: 41168 - RNA, 20 nt, Artificial Sequence
  spacer sequence TTCN PAM
gacaacccgugucccauucc

SEQ ID NO: 41169 - RNA, 20 nt, Artificial Sequence
  spacer sequence TTCN PAM
acucccgaccagacugaggu

SEQ ID NO: 41170 - RNA, 20 nt, Artificial Sequence
  spacer sequence TTCN PAM
acucccgaccagacugaggu

SEQ ID NO: 41171 - RNA, 20 nt, Artificial Sequence
  spacer sequence TTCN PAM
acucccgaccagacugaggu

SEQ ID NO: 41172 - RNA, 20 nt, Artificial Sequence
  spacer sequence TTCN PAM
acucccgaccagacugaggu

SEQ ID NO: 41173 - RNA, 20 nt, Artificial Sequence
  spacer sequence TTCN PAM
cacuggaagcagaaugagcc

SEQ ID NO: 41174 - RNA, 20 nt, Artificial Sequence
  spacer sequence TTCN PAM
agugagaacaaagguggcgg

SEQ ID NO: 41175 - RNA, 20 nt, Artificial Sequence
  spacer sequence TTCN PAM
gcuuccagugagaacaaagg

SEQ ID NO: 41176 - RNA, 20 nt, Artificial Sequence
  spacer sequence TTCN PAM
caccuggggccccagcccuu

SEQ ID NO: 41177 - RNA, 20 nt, Artificial Sequence
  spacer sequence TTCN PAM
uccaagccccauucaucgac

SEQ ID NO: 41178 - RNA, 20 nt, Artificial Sequence
  spacer sequence TTCN PAM
ucgacccugccccuccuccc

SEQ ID NO: 41179 - RNA, 20 nt, Artificial Sequence
  spacer sequence TTCN PAM
cuaagcucccagaacugcuc

SEQ ID NO: 41180 - RNA, 20 nt, Artificial Sequence
  spacer sequence TTCN PAM
gggagcuuagugaacuggac

SEQ ID NO: 41181 - RNA, 20 nt, Artificial Sequence
  spacer sequence TTCN PAM
cacuuccuggaccaucgucu

SEQ ID NO: 41182 - RNA, 20 nt, Artificial Sequence
  spacer sequence TTCN PAM
uggaccaucgucuuuuuuuu

SEQ ID NO: 41183 - RNA, 20 nt, Artificial Sequence
  spacer sequence TTCN PAM
cucuuauugcccaggcugga

SEQ ID NO: 41184 - RNA, 20 nt, Artificial Sequence
  spacer sequence TTCN PAM
agcaaugcucccgccucagc

SEQ ID NO: 41185 - RNA, 20 nt, Artificial Sequence
  spacer sequence TTCN PAM
ccauguugaucaggcugguc

SEQ ID NO: 41186 - RNA, 20 nt, Artificial Sequence
  spacer sequence TTCN PAM
agaccagccugaucaacaug

SEQ ID NO: 41187 - RNA, 20 nt, Artificial Sequence
  spacer sequence TTCN PAM
gucucaaaaaaaaaaaaaaa

SEQ ID NO: 41188 - RNA, 20 nt, Artificial Sequence
  spacer sequence TTCN PAM
agcgauucuccugccucagc

SEQ ID NO: 41189 - RNA, 20 nt, Artificial Sequence
  spacer sequence TTCN PAM
ccugccucagccuccugagu

SEQ ID NO: 41190 - RNA, 20 nt, Artificial Sequence
  spacer sequence TTCN PAM
ccauguuggccaggcugguc

SEQ ID NO: 41191 - RNA, 20 nt, Artificial Sequence
  spacer sequence TTCN PAM
ucaaaccgcagccccuguga

SEQ ID NO: 41192 - RNA, 20 nt, Artificial Sequence
  spacer sequence TTCN PAM
aaggguuaucccagccucuc

SEQ ID NO: 41193 - RNA, 20 nt, Artificial Sequence
  spacer sequence TTCN PAM
gggcugggugugccugucaa

SEQ ID NO: 41194 - RNA, 20 nt, Artificial Sequence
  spacer sequence TTCN PAM
ggcugccacccaugcucccg

SEQ ID NO: 41195 - RNA, 20 nt, Artificial Sequence
  spacer sequence TTCN PAM
uacgggagcaccuccugucc

SEQ ID NO: 41196 - RNA, 20 nt, Artificial Sequence
  spacer sequence TTCN PAM
cuaaauagaggggcaggacg

SEQ ID NO: 41197 - RNA, 20 nt, Artificial Sequence
  spacer sequence TTCN PAM
ccgucggcuuuuugaggaug

SEQ ID NO: 41198 - RNA, 20 nt, Artificial Sequence
  spacer sequence TTCN PAM
ugucucauuggcuguggccu

SEQ ID NO: 41199 - RNA, 20 nt, Artificial Sequence
  spacer sequence TTCN PAM
ucaucuguaaaaugggguaa

SEQ ID NO: 41200 - RNA, 20 nt, Artificial Sequence
  spacer sequence TTCN PAM
ucuguaaaaugggguaaugc

SEQ ID NO: 41201 - RNA, 20 nt, Artificial Sequence
  spacer sequence TTCN PAM
cagccuuuggggugggcauu

SEQ ID NO: 41202 - RNA, 20 nt, Artificial Sequence
  spacer sequence TTCN PAM
ccagggugggugggagugug

SEQ ID NO: 41203 - RNA, 20 nt, Artificial Sequence
  spacer sequence TTCN PAM
uggacgacagccgcugacuc

SEQ ID NO: 41204 - RNA, 20 nt, Artificial Sequence
  spacer sequence TTCN PAM
cgucccccccacgcgggcgc

SEQ ID NO: 41205 - RNA, 20 nt, Artificial Sequence
  spacer sequence TTCN PAM
gccugggggcgcccgcgugg

SEQ ID NO: 41206 - RNA, 20 nt, Artificial Sequence
  spacer sequence TTCN PAM
ugucgccccaggcccggugc

SEQ ID NO: 41207 - RNA, 20 nt, Artificial Sequence
  spacer sequence TTCN PAM
gggugcaucucagcccgcgg

SEQ ID NO: 41208 - RNA, 20 nt, Artificial Sequence
  spacer sequence TTCN PAM
aggggaguccccccaugaac

SEQ ID NO: 41209 - RNA, 20 nt, Artificial Sequence
  spacer sequence TTCN PAM
uggggggacuccccuugaau

SEQ ID NO: 41210 - RNA, 20 nt, Artificial Sequence
  spacer sequence TTCN PAM
cucgggguggaguuagggcg

SEQ ID NO: 41211 - RNA, 20 nt, Artificial Sequence
  spacer sequence TTCN PAM
gccccggacgaagguacucg

SEQ ID NO: 41212 - RNA, 20 nt, Artificial Sequence
  spacer sequence TTCN PAM
uccggggccgaaugcgcgcu

SEQ ID NO: 41213 - RNA, 20 nt, Artificial Sequence
  spacer sequence TTCN PAM
gcgcuccaagugcugcgagu

SEQ ID NO: 41214 - RNA, 20 nt, Artificial Sequence
  spacer sequence TTCN PAM
ucggcccgcagguccccccc

SEQ ID NO: 41215 - RNA, 20 nt, Artificial Sequence
  spacer sequence TTCN PAM
uuguucuugggacaggaggg

SEQ ID NO: 41216 - RNA, 20 nt, Artificial Sequence
  spacer sequence TTCN PAM
ugggacaggagggaucgggg

SEQ ID NO: 41217 - RNA, 20 nt, Artificial Sequence
  spacer sequence TTCN PAM
caggaccggaggcuccccga

SEQ ID NO: 41218 - RNA, 20 nt, Artificial Sequence
  spacer sequence TTCN PAM
ccgcgggugaccuugaacug

SEQ ID NO: 41219 - RNA, 20 nt, Artificial Sequence
  spacer sequence TTCN PAM
aggucacccgcggugaaggg

SEQ ID NO: 41220 - RNA, 20 nt, Artificial Sequence
  spacer sequence TTCN PAM
gcccuccguugcccagccac

SEQ ID NO: 41221 - RNA, 20 nt, Artificial Sequence
  spacer sequence TTCN PAM
uucccgaucgggguuccucc

SEQ ID NO: 41222 - RNA, 20 nt, Artificial Sequence
  spacer sequence TTCN PAM
cgaucgggguuccucccccg

SEQ ID NO: 41223 - RNA, 20 nt, Artificial Sequence
  spacer sequence TTCN PAM
ucccccgcgcgcagcccagu

SEQ ID NO: 41224 - RNA, 20 nt, Artificial Sequence
  spacer sequence TTCN PAM
uccccugccaggggcagcgc

SEQ ID NO: 41225 - RNA, 20 nt, Artificial Sequence
  spacer sequence TTCN PAM
ccgaggcgcgcccgcucgag

SEQ ID NO: 41226 - RNA, 20 nt, Artificial Sequence
  spacer sequence TTCN PAM
gcccgcggccggcggguggg

SEQ ID NO: 41227 - RNA, 20 nt, Artificial Sequence
  spacer sequence TTCN PAM
cgcucccgcuuccgcucgcg

SEQ ID NO: 41228 - RNA, 20 nt, Artificial Sequence
  spacer sequence TTCN PAM
gcucgcggcuuuucccggac

SEQ ID NO: 41229 - RNA, 20 nt, Artificial Sequence
  spacer sequence TTCN PAM
cggacgaaggcggcggggug

SEQ ID NO: 41230 - RNA, 20 nt, Artificial Sequence
  spacer sequence TTCN PAM
uccgggaaaagccgcgagcg

SEQ ID NO: 41231 - RNA, 20 nt, Artificial Sequence
  spacer sequence TTCN PAM
ugccccucccggcgccggga

SEQ ID NO: 41232 - RNA, 20 nt, Artificial Sequence
  spacer sequence TTCN PAM
cggcgccgggaggggcagga

SEQ ID NO: 41233 - RNA, 20 nt, Artificial Sequence
  spacer sequence TTCN PAM
uaagcgcccggagcccgcaa

SEQ ID NO: 41234 - RNA, 20 nt, Artificial Sequence
  spacer sequence TTCN PAM
cuacuuacuccgccggccgg

SEQ ID NO: 41235 - RNA, 20 nt, Artificial Sequence
  spacer sequence TTCN PAM
agggggcggggccgccgccc

SEQ ID NO: 41236 - RNA, 20 nt, Artificial Sequence
  spacer sequence TTCN PAM
uguuacuuucacccccagau

SEQ ID NO: 41237 - RNA, 20 nt, Artificial Sequence
  spacer sequence TTCN PAM
cccccagauccuccgagcgg

SEQ ID NO: 41238 - RNA, 20 nt, Artificial Sequence
  spacer sequence TTCN PAM
ucgcgcguccccucccuuag

SEQ ID NO: 41239 - RNA, 20 nt, Artificial Sequence
  spacer sequence TTCN PAM
aagggcggcgggcgcgaccg

SEQ ID NO: 41240 - RNA, 20 nt, Artificial Sequence
  spacer sequence TTCN PAM
ccuucaaagggcggcgggcg

SEQ ID NO: 41241 - RNA, 20 nt, Artificial Sequence
  spacer sequence TTCN PAM
ggggguggggacggcacuug

SEQ ID NO: 41242 - RNA, 20 nt, Artificial Sequence
  spacer sequence TTCN PAM
gucucgcauuccgcggccgg

SEQ ID NO: 41243 - RNA, 20 nt, Artificial Sequence
  spacer sequence TTCN PAM
gcggccgggacuuucucgag

SEQ ID NO: 41244 - RNA, 20 nt, Artificial Sequence
  spacer sequence TTCN PAM
cgaggaggacgcgcgcugcu

SEQ ID NO: 41245 - RNA, 20 nt, Artificial Sequence
  spacer sequence TTCN PAM
ccacaaagacacguagguac

SEQ ID NO: 41246 - RNA, 20 nt, Artificial Sequence
  spacer sequence TTCN PAM
cgcccgggggccggggcccg

SEQ ID NO: 41247 - RNA, 20 nt, Artificial Sequence
  spacer sequence TTCN PAM
ccgcgcggcgcgcucuuugu

SEQ ID NO: 41248 - RNA, 20 nt, Artificial Sequence
  spacer sequence TTCN PAM
gcggccccccuugggggcgg

SEQ ID NO: 41249 - RNA, 20 nt, Artificial Sequence
  spacer sequence TTCN PAM
ugcccgcccccaaggggggc

SEQ ID NO: 41250 - RNA, 20 nt, Artificial Sequence
  spacer sequence TTCN PAM
gcaucugcucggcggccucc

SEQ ID NO: 41251 - RNA, 20 nt, Artificial Sequence
  spacer sequence TTCN PAM
cgccuccgagcgcuccccgc

SEQ ID NO: 41252 - RNA, 20 nt, Artificial Sequence
  spacer sequence TTCN PAM
gcccgaggagaggcccuggg

SEQ ID NO: 41253 - RNA, 20 nt, Artificial Sequence
  spacer sequence TTCN PAM
uacaaagaggagccaggacu

SEQ ID NO: 41254 - RNA, 20 nt, Artificial Sequence
  spacer sequence TTCN PAM
aguccuggcuccucuuugua

SEQ ID NO: 41255 - RNA, 20 nt, Artificial Sequence
  spacer sequence TTCN PAM
cuaauucuaguccuggcucc

SEQ ID NO: 41256 - RNA, 20 nt, Artificial Sequence
  spacer sequence TTCN PAM
cccacgaccccagggcagcc

SEQ ID NO: 41257 - RNA, 20 nt, Artificial Sequence
  spacer sequence TTCN PAM
ccuccucugggccccagugu

SEQ ID NO: 41258 - RNA, 20 nt, Artificial Sequence
  spacer sequence TTCN PAM
acuggagggaagggguccga

SEQ ID NO: 41259 - RNA, 20 nt, Artificial Sequence
  spacer sequence TTCN PAM
cuccaguggaacccccgccc

SEQ ID NO: 41260 - RNA, 20 nt, Artificial Sequence
  spacer sequence TTCN PAM
gaccccuucccuccagugga

SEQ ID NO: 41261 - RNA, 20 nt, Artificial Sequence
  spacer sequence TTCN PAM
agauccagggcccuaagcgc

SEQ ID NO: 41262 - RNA, 20 nt, Artificial Sequence
  spacer sequence TTCN PAM
cggcuuccagauccagggcc

SEQ ID NO: 41263 - RNA, 20 nt, Artificial Sequence
  spacer sequence TTCN PAM
cacccccaccccuucccggc

SEQ ID NO: 41264 - RNA, 20 nt, Artificial Sequence
  spacer sequence TTCN PAM
gcgucccugugucgucuccg

SEQ ID NO: 41265 - RNA, 20 nt, Artificial Sequence
  spacer sequence TTCN PAM
uuccuccccccagccggcuc

SEQ ID NO: 41266 - RNA, 20 nt, Artificial Sequence
  spacer sequence TTCN PAM
uccccccagccggcucaguu

SEQ ID NO: 41267 - RNA, 20 nt, Artificial Sequence
  spacer sequence TTCN PAM
gggaagcugcaggaguucgg

SEQ ID NO: 41268 - RNA, 20 nt, Artificial Sequence
  spacer sequence TTCN PAM
ccgaacugagccggcugggg

SEQ ID NO: 41269 - RNA, 20 nt, Artificial Sequence
  spacer sequence TTCN PAM
gcgugggugauggcagcaag

SEQ ID NO: 41270 - RNA, 20 nt, Artificial Sequence
  spacer sequence TTCN PAM
acgguggguaccaaggucag

SEQ ID NO: 41271 - RNA, 20 nt, Artificial Sequence
  spacer sequence TTCN PAM
agcccaggauuccgacccca

SEQ ID NO: 41272 - RNA, 20 nt, Artificial Sequence
  spacer sequence TTCN PAM
gaccccacacucaggccccu

SEQ ID NO: 41273 - RNA, 20 nt, Artificial Sequence
  spacer sequence TTCN PAM
ggccuugaggccugagacua

SEQ ID NO: 41274 - RNA, 20 nt, Artificial Sequence
  spacer sequence TTCN PAM
uaacagggcagcccugggag

SEQ ID NO: 41275 - RNA, 20 nt, Artificial Sequence
  spacer sequence TTCN PAM
ccaccugacccggagggcuu

SEQ ID NO: 41276 - RNA, 20 nt, Artificial Sequence
  spacer sequence TTCN PAM
cucccacgguggcugcccug

SEQ ID NO: 41277 - RNA, 20 nt, Artificial Sequence
  spacer sequence TTCN PAM
cccagggcagccaccguggg

SEQ ID NO: 41278 - RNA, 20 nt, Artificial Sequence
  spacer sequence TTCN PAM
caagacugccugcaggauga

SEQ ID NO: 41279 - RNA, 20 nt, Artificial Sequence
  spacer sequence TTCN PAM
ccagagcgaguuucuccuuu

SEQ ID NO: 41280 - RNA, 20 nt, Artificial Sequence
  spacer sequence TTCN PAM
ccuuuuuuacauuucugcug

SEQ ID NO: 41281 - RNA, 20 nt, Artificial Sequence
  spacer sequence TTCN PAM
gcugagggcuggggguggcg

SEQ ID NO: 41282 - RNA, 20 nt, Artificial Sequence
  spacer sequence TTCN PAM
gccuuccgugacccccaucg

SEQ ID NO: 41283 - RNA, 20 nt, Artificial Sequence
  spacer sequence TTCN PAM
gugacccccaucgugagagg

SEQ ID NO: 41284 - RNA, 20 nt, Artificial Sequence
  spacer sequence TTCN PAM
cuaccccgaaaggggagggg

SEQ ID NO: 41285 - RNA, 20 nt, Artificial Sequence
  spacer sequence TTCN PAM
ggguagagaacaaaggccag

SEQ ID NO: 41286 - RNA, 20 nt, Artificial Sequence
  spacer sequence TTCN PAM
uaacauccugucuaggccuc

SEQ ID NO: 41287 - RNA, 20 nt, Artificial Sequence
  spacer sequence TTCN PAM
cgguuuugcugcggacuuuu

SEQ ID NO: 41288 - RNA, 20 nt, Artificial Sequence
  spacer sequence TTCN PAM
ccuucuuuccucauuuucuu

SEQ ID NO: 41289 - RNA, 20 nt, Artificial Sequence
  spacer sequence TTCN PAM
uuccucauuuucuuggcugc

SEQ ID NO: 41290 - RNA, 20 nt, Artificial Sequence
  spacer sequence TTCN PAM
ucauuuucuuggcugcggcc

SEQ ID NO: 41291 - RNA, 20 nt, Artificial Sequence
  spacer sequence TTCN PAM
uggcugcggccaagccuucc

SEQ ID NO: 41292 - RNA, 20 nt, Artificial Sequence
  spacer sequence TTCN PAM
ucagacaagggcccuggcca

SEQ ID NO: 41293 - RNA, 20 nt, Artificial Sequence
  spacer sequence TTCN PAM
cgggccucccuggccccgag

SEQ ID NO: 41294 - RNA, 20 nt, Artificial Sequence
  spacer sequence TTCN PAM
gcuuucccagcggcauguag

SEQ ID NO: 41295 - RNA, 20 nt, Artificial Sequence
  spacer sequence TTCN PAM
cagcggcauguagaguccug

SEQ ID NO: 41296 - RNA, 20 nt, Artificial Sequence
  spacer sequence TTCN PAM
cuacaucgcgggggcagggc

SEQ ID NO: 41297 - RNA, 20 nt, Artificial Sequence
  spacer sequence TTCN PAM
uggggcgagugugagcagag

SEQ ID NO: 41298 - RNA, 20 nt, Artificial Sequence
  spacer sequence TTCN PAM
cacccuccucccugggcgcc

SEQ ID NO: 41299 - RNA, 20 nt, Artificial Sequence
  spacer sequence TTCN PAM
ugacgcaggcgcccagggag

SEQ ID NO: 41300 - RNA, 20 nt, Artificial Sequence
  spacer sequence TTCN PAM
cugccuggcaccgagucaug

SEQ ID NO: 41301 - RNA, 20 nt, Artificial Sequence
  spacer sequence TTCN PAM
ccagggaggaaguugcaggg

SEQ ID NO: 41302 - RNA, 20 nt, Artificial Sequence
  spacer sequence TTCN PAM
ucccuggggaaggcuaaugg

SEQ ID NO: 41303 - RNA, 20 nt, Artificial Sequence
  spacer sequence TTCN PAM
cgagagcagcuggagucccc

SEQ ID NO: 41304 - RNA, 20 nt, Artificial Sequence
  spacer sequence TTCN PAM
ugcaaaggcugucuuggggc

SEQ ID NO: 41305 - RNA, 20 nt, Artificial Sequence
  spacer sequence TTCN PAM
cccugcccuccucccugccu

SEQ ID NO: 41306 - RNA, 20 nt, Artificial Sequence
  spacer sequence TTCN PAM
cugcuuggggcccaugggga

SEQ ID NO: 41307 - RNA, 20 nt, Artificial Sequence
  spacer sequence TTCN PAM
gagucaucccagccuauguc

SEQ ID NO: 41308 - RNA, 20 nt, Artificial Sequence
  spacer sequence TTCN PAM
cagaaaccuccgccaccccc

SEQ ID NO: 41309 - RNA, 20 nt, Artificial Sequence
  spacer sequence TTCN PAM
gagaagugacauaggcuggg

SEQ ID NO: 41310 - RNA, 20 nt, Artificial Sequence
  spacer sequence TTCN PAM
acccacacccacccugaacg

SEQ ID NO: 41311 - RNA, 20 nt, Artificial Sequence
  spacer sequence TTCN PAM
ggguggguguggguugaauc

SEQ ID NO: 41312 - RNA, 20 nt, Artificial Sequence
  spacer sequence TTCN PAM
gugcuuggagcagguugugc

SEQ ID NO: 41313 - RNA, 20 nt, Artificial Sequence
  spacer sequence TTCN PAM
ugcagccuugccacagcccc

SEQ ID NO: 41314 - RNA, 20 nt, Artificial Sequence
  spacer sequence TTCN PAM
caagauaaauauuuaucugu

SEQ ID NO: 41315 - RNA, 20 nt, Artificial Sequence
  spacer sequence TTCN PAM
guccuaaccuuugcuuucuc

SEQ ID NO: 41316 - RNA, 20 nt, Artificial Sequence
  spacer sequence TTCN PAM
ucuguccuaaccuuugcuuu

SEQ ID NO: 41317 - RNA, 20 nt, Artificial Sequence
  spacer sequence TTCN PAM
ugcaggaauuccacccacuu

SEQ ID NO: 41318 - RNA, 20 nt, Artificial Sequence
  spacer sequence TTCN PAM
ugcacgaauucuucuguccu

SEQ ID NO: 41319 - RNA, 20 nt, Artificial Sequence
  spacer sequence TTCN PAM
acccacuugcuggcccuggu

SEQ ID NO: 41320 - RNA, 20 nt, Artificial Sequence
  spacer sequence TTCN PAM
cccacccucaugggccccua

SEQ ID NO: 41321 - RNA, 20 nt, Artificial Sequence
  spacer sequence TTCN PAM
cuuugccuuucccccacccu

SEQ ID NO: 41322 - RNA, 20 nt, Artificial Sequence
  spacer sequence TTCN PAM
ccuugcaagaccgaccuagu

SEQ ID NO: 41323 - RNA, 20 nt, Artificial Sequence
  spacer sequence TTCN PAM
ggaaauacagauucauuuua

SEQ ID NO: 41324 - RNA, 20 nt, Artificial Sequence
  spacer sequence TTCN PAM
ggaagccuccuccgccagcc

SEQ ID NO: 41325 - RNA, 20 nt, Artificial Sequence
  spacer sequence TTCN PAM
uuuuauuuaagcguccgugg

SEQ ID NO: 41326 - RNA, 20 nt, Artificial Sequence
  spacer sequence TTCN PAM
ugucgggccguucgccacug

SEQ ID NO: 41327 - RNA, 20 nt, Artificial Sequence
  spacer sequence TTCN PAM
ccacugacacuggccuugcg

SEQ ID NO: 41328 - RNA, 20 nt, Artificial Sequence
  spacer sequence TTCN PAM
ugcagcugcagcucgcggcc

SEQ ID NO: 41329 - RNA, 20 nt, Artificial Sequence
  spacer sequence TTCN PAM
ggucccacgcagccuccacc

SEQ ID NO: 41330 - RNA, 20 nt, Artificial Sequence
  spacer sequence TTCN PAM
ccaggcucaccuccgggcag

SEQ ID NO: 41331 - RNA, 20 nt, Artificial Sequence
  spacer sequence TTCN PAM
cuuccccaggcucaccuccg

SEQ ID NO: 41332 - RNA, 20 nt, Artificial Sequence
  spacer sequence TTCN PAM
aaccaagggucacccuuccc

SEQ ID NO: 41333 - RNA, 20 nt, Artificial Sequence
  spacer sequence TTCN PAM
agauccugaguugacgguca

SEQ ID NO: 41334 - RNA, 20 nt, Artificial Sequence
  spacer sequence TTCN PAM
ucccaucagcagauggacug

SEQ ID NO: 41335 - RNA, 20 nt, Artificial Sequence
  spacer sequence TTCN PAM
ggagcggggggcagggcugg

SEQ ID NO: 41336 - RNA, 20 nt, Artificial Sequence
  spacer sequence TTCN PAM
caaagcucucgaugacggcg

SEQ ID NO: 41337 - RNA, 20 nt, Artificial Sequence
  spacer sequence TTCN PAM
cagggaccuucucugguagg

SEQ ID NO: 41338 - RNA, 20 nt, Artificial Sequence
  spacer sequence TTCN PAM
cugguaggugucacagcaca

SEQ ID NO: 41339 - RNA, 20 nt, Artificial Sequence
  spacer sequence TTCN PAM
gggcauacacaggcuguguc

SEQ ID NO: 41340 - RNA, 20 nt, Artificial Sequence
  spacer sequence TTCN PAM
caugucccccaggaaucccc

SEQ ID NO: 41341 - RNA, 20 nt, Artificial Sequence
  spacer sequence TTCN PAM
ugggggacaugugaagugag

SEQ ID NO: 41342 - RNA, 20 nt, Artificial Sequence
  spacer sequence TTCN PAM
ggaucugcaggauggugccg

SEQ ID NO: 41343 - RNA, 20 nt, Artificial Sequence
  spacer sequence TTCN PAM
cuggcccagcuccgcugcca

SEQ ID NO: 41344 - RNA, 20 nt, Artificial Sequence
  spacer sequence TTCN PAM
gggggccaggucgggggccg

SEQ ID NO: 41345 - RNA, 20 nt, Artificial Sequence
  spacer sequence TTCN PAM
cgcaggagguaguucugggg

SEQ ID NO: 41346 - RNA, 20 nt, Artificial Sequence
  spacer sequence TTCN PAM
ccgcccgccugggcuucuca

SEQ ID NO: 41347 - RNA, 20 nt, Artificial Sequence
  spacer sequence TTCN PAM
caaggccccucugugugagc

SEQ ID NO: 41348 - RNA, 20 nt, Artificial Sequence
  spacer sequence TTCN PAM
cuccgggcuggagcagagca

SEQ ID NO: 41349 - RNA, 20 nt, Artificial Sequence
  spacer sequence TTCN PAM
uccugccccacccccacccg

SEQ ID NO: 41350 - RNA, 20 nt, Artificial Sequence
  spacer sequence TTCN PAM
cagaggcaccaaaugccauc

SEQ ID NO: 41351 - RNA, 20 nt, Artificial Sequence
  spacer sequence TTCN PAM
gugacuuggaaaagcagcga

SEQ ID NO: 41352 - RNA, 20 nt, Artificial Sequence
  spacer sequence TTCN PAM
aagucacugaaaugcuuagg

SEQ ID NO: 41353 - RNA, 20 nt, Artificial Sequence
  spacer sequence TTCN PAM
cugcuuuuccaagucacuga

SEQ ID NO: 41354 - RNA, 20 nt, Artificial Sequence
  spacer sequence TTCN PAM
ggugagacucuggagggagu

SEQ ID NO: 41355 - RNA, 20 nt, Artificial Sequence
  spacer sequence TTCN PAM
cacuuuuaaacugagcuggg

SEQ ID NO: 41356 - RNA, 20 nt, Artificial Sequence
  spacer sequence TTCN PAM
ccauguuagccaagaugguc

SEQ ID NO: 41357 - RNA, 20 nt, Artificial Sequence
  spacer sequence TTCN PAM
acuaaaaauacaaaaaauua

SEQ ID NO: 41358 - RNA, 20 nt, Artificial Sequence
  spacer sequence TTCN PAM
ccugucucagccucccgagu

SEQ ID NO: 41359 - RNA, 20 nt, Artificial Sequence
  spacer sequence TTCN PAM
cgccauucuccugucucagc

SEQ ID NO: 41360 - RNA, 20 nt, Artificial Sequence
  spacer sequence TTCN PAM
gugauccgaggggagauacu

SEQ ID NO: 41361 - RNA, 20 nt, Artificial Sequence
  spacer sequence TTCN PAM
uggaguccuacauggagggg

SEQ ID NO: 41362 - RNA, 20 nt, Artificial Sequence
  spacer sequence TTCN PAM
uccuggaguccuacauggag

SEQ ID NO: 41363 - RNA, 20 nt, Artificial Sequence
  spacer sequence TTCN PAM
ccagcucagccaugagcugg

SEQ ID NO: 41364 - RNA, 20 nt, Artificial Sequence
  spacer sequence TTCN PAM
aauucuccagcucagccaug

SEQ ID NO: 41365 - RNA, 20 nt, Artificial Sequence
  spacer sequence TTCN PAM
agacaggccugagccacaga

SEQ ID NO: 41366 - RNA, 20 nt, Artificial Sequence
  spacer sequence TTCN PAM
agacaggccugggcaaccuc

SEQ ID NO: 41367 - RNA, 20 nt, Artificial Sequence
  spacer sequence TTCN PAM
ccugccucggccucccaaag

SEQ ID NO: 41368 - RNA, 20 nt, Artificial Sequence
  spacer sequence TTCN PAM
cgccuguaaucucagcacuu

SEQ ID NO: 41369 - RNA, 20 nt, Artificial Sequence
  spacer sequence TTCN PAM
uuugcugaccucccuccagg

SEQ ID NO: 41370 - RNA, 20 nt, Artificial Sequence
  spacer sequence TTCN PAM
gcagguggaggcuuugggag

SEQ ID NO: 41371 - RNA, 20 nt, Artificial Sequence
  spacer sequence TTCN PAM
gcagacagaaaaccgcgcca

SEQ ID NO: 41372 - RNA, 20 nt, Artificial Sequence
  spacer sequence TTCN PAM
gucugccgaagccggucccc

SEQ ID NO: 41373 - RNA, 20 nt, Artificial Sequence
  spacer sequence TTCN PAM
accuugcagcgcguggcgcg

SEQ ID NO: 41374 - RNA, 20 nt, Artificial Sequence
  spacer sequence TTCN PAM
gcagcagaaacggcuccgua

SEQ ID NO: 41375 - RNA, 20 nt, Artificial Sequence
  spacer sequence TTCN PAM
gcugcagaagcagcugcagc

SEQ ID NO: 41376 - RNA, 20 nt, Artificial Sequence
  spacer sequence TTCN PAM
acggagccguuucugcugca

SEQ ID NO: 41377 - RNA, 20 nt, Artificial Sequence
  spacer sequence TTCN PAM
aggacuccguguggaagcca

SEQ ID NO: 41378 - RNA, 20 nt, Artificial Sequence
  spacer sequence TTCN PAM
acacggaguccucgaagucg

SEQ ID NO: 41379 - RNA, 20 nt, Artificial Sequence
  spacer sequence TTCN PAM
ggcuuccacacggaguccuc

SEQ ID NO: 41380 - RNA, 20 nt, Artificial Sequence
  spacer sequence TTCN PAM
ugguggcuuaggaucuucgg

SEQ ID NO: 41381 - RNA, 20 nt, Artificial Sequence
  spacer sequence TTCN PAM
gaucggccacccucgccccu

SEQ ID NO: 41382 - RNA, 20 nt, Artificial Sequence
  spacer sequence TTCN PAM
cuccggggcucucggagucc

SEQ ID NO: 41383 - RNA, 20 nt, Artificial Sequence
  spacer sequence TTCN PAM
ggcugggggaguggccgccu

SEQ ID NO: 41384 - RNA, 20 nt, Artificial Sequence
  spacer sequence TTCN PAM
uuucuucuuuuuuauuauuu

SEQ ID NO: 41385 - RNA, 20 nt, Artificial Sequence
  spacer sequence TTCN PAM
ucuuuuuuauuauuuuuuuc

SEQ ID NO: 41386 - RNA, 20 nt, Artificial Sequence
  spacer sequence TTCN PAM
uuuuuauuauuuuuuucuuu

SEQ ID NO: 41387 - RNA, 20 nt, Artificial Sequence
  spacer sequence TTCN PAM
uuuuuuaaaaaguucugacc

SEQ ID NO: 41388 - RNA, 20 nt, Artificial Sequence
  spacer sequence TTCN PAM
gaccgugguuuccuggacuc

SEQ ID NO: 41389 - RNA, 20 nt, Artificial Sequence
  spacer sequence TTCN PAM
uggacucuucaugggcuuug

SEQ ID NO: 41390 - RNA, 20 nt, Artificial Sequence
  spacer sequence TTCN PAM
ugggcuuugcuuccuaccuc

SEQ ID NO: 41391 - RNA, 20 nt, Artificial Sequence
  spacer sequence TTCN PAM
uaccuccuucacccuucacu

SEQ ID NO: 41392 - RNA, 20 nt, Artificial Sequence
  spacer sequence TTCN PAM
cccuucacuccugcccuccu

SEQ ID NO: 41393 - RNA, 20 nt, Artificial Sequence
  spacer sequence TTCN PAM
cuccugcccuccucuuccuc

SEQ ID NO: 41394 - RNA, 20 nt, Artificial Sequence
  spacer sequence TTCN PAM
uccuccuccuccuccuccgu

SEQ ID NO: 41395 - RNA, 20 nt, Artificial Sequence
  spacer sequence TTCN PAM
ccucugcgccaggucggucc

SEQ ID NO: 41396 - RNA, 20 nt, Artificial Sequence
  spacer sequence TTCN PAM
ccagcuccaauauguagcag

SEQ ID NO: 41397 - RNA, 20 nt, Artificial Sequence
  spacer sequence TTCN PAM
cucuccgccauccagagaga

SEQ ID NO: 41398 - RNA, 20 nt, Artificial Sequence
  spacer sequence TTCN PAM
ccgucuccuucacucuccgc

SEQ ID NO: 41399 - RNA, 20 nt, Artificial Sequence
  spacer sequence TTCN PAM
gccgccuccuuucccccccg

SEQ ID NO: 41400 - RNA, 20 nt, Artificial Sequence
  spacer sequence TTCN PAM
cccccgacccuauucagguu

SEQ ID NO: 41401 - RNA, 20 nt, Artificial Sequence
  spacer sequence TTCN PAM
gguuuuaagucaaaaauguc

SEQ ID NO: 41402 - RNA, 20 nt, Artificial Sequence
  spacer sequence TTCN PAM
gcgcacugcggccccucccc

SEQ ID NO: 41403 - RNA, 20 nt, Artificial Sequence
  spacer sequence TTCN PAM
gggucuccaccccaggccag

SEQ ID NO: 41404 - RNA, 20 nt, Artificial Sequence
  spacer sequence TTCN PAM
gugaccuguuggcuugcugu

SEQ ID NO: 41405 - RNA, 20 nt, Artificial Sequence
  spacer sequence TTCN PAM
cuuccacuccuauccucuuu

SEQ ID NO: 41406 - RNA, 20 nt, Artificial Sequence
  spacer sequence TTCN PAM
acuccuauccucuuuucuug

SEQ ID NO: 41407 - RNA, 20 nt, Artificial Sequence
  spacer sequence TTCN PAM
ugaucuuuuuuuugcauuuu

SEQ ID NO: 41408 - RNA, 20 nt, Artificial Sequence
  spacer sequence TTCN PAM
uucauuucuuuaacaaggag

SEQ ID NO: 41409 - RNA, 20 nt, Artificial Sequence
  spacer sequence TTCN PAM
uuucuuuaacaaggagagca

SEQ ID NO: 41410 - RNA, 20 nt, Artificial Sequence
  spacer sequence TTCN PAM
uuaacaaggagagcaaagcu

SEQ ID NO: 41411 - RNA, 20 nt, Artificial Sequence
  spacer sequence TTCN PAM
ugucgggaagggagagggga

SEQ ID NO: 41412 - RNA, 20 nt, Artificial Sequence
  spacer sequence TTCN PAM
cgacaggaaagggugccaug

SEQ ID NO: 41413 - RNA, 20 nt, Artificial Sequence
  spacer sequence TTCN PAM
ccucucccuucccgacagga

SEQ ID NO: 41414 - RNA, 20 nt, Artificial Sequence
  spacer sequence TTCN PAM
uccgcccccacucccguguu

SEQ ID NO: 41415 - RNA, 20 nt, Artificial Sequence
  spacer sequence TTCN PAM
gaccuccugccugaguuugg

SEQ ID NO: 41416 - RNA, 20 nt, Artificial Sequence
  spacer sequence TTCN PAM
gacugagccaauagugguug

SEQ ID NO: 41417 - RNA, 20 nt, Artificial Sequence
  spacer sequence TTCN PAM
ccaaccacuauuggcucagu

SEQ ID NO: 41418 - RNA, 20 nt, Artificial Sequence
  spacer sequence TTCN PAM
agaguuccccaaccacuauu

SEQ ID NO: 41419 - RNA, 20 nt, Artificial Sequence
  spacer sequence TTCN PAM
cuccccuuuuucaagaguuc

SEQ ID NO: 41420 - RNA, 20 nt, Artificial Sequence
  spacer sequence TTCN PAM
ccccuccgagcccuccuucc

SEQ ID NO: 41421 - RNA, 20 nt, Artificial Sequence
  spacer sequence TTCN PAM
cggcccaaccugagggaugu

SEQ ID NO: 41422 - RNA, 20 nt, Artificial Sequence
  spacer sequence TTCN PAM
cagcucagcacccccuccca

SEQ ID NO: 41423 - RNA, 20 nt, Artificial Sequence
  spacer sequence TTCN PAM
augggguaguuuuuggauuu

SEQ ID NO: 41424 - RNA, 20 nt, Artificial Sequence
  spacer sequence TTCN PAM
ccacucacuuuuuauuuuuu

SEQ ID NO: 41425 - RNA, 20 nt, Artificial Sequence
  spacer sequence TTCN PAM
ucaccccaccugucggucuu

SEQ ID NO: 41426 - RNA, 20 nt, Artificial Sequence
  spacer sequence TTCN PAM
cguaggugaaccccaggucc

SEQ ID NO: 41427 - RNA, 20 nt, Artificial Sequence
  spacer sequence TTCN PAM
ccuacgagaacaacgguggg

SEQ ID NO: 41428 - RNA, 20 nt, Artificial Sequence
  spacer sequence TTCN PAM
acacauaaagggggggaguu

SEQ ID NO: 41429 - RNA, 20 nt, Artificial Sequence
  spacer sequence TTCN PAM
gaugugaacaucacguguua

SEQ ID NO: 41430 - RNA, 20 nt, Artificial Sequence
  spacer sequence TTCN PAM
caucugaaaccauuaacuuu

SEQ ID NO: 41431 - RNA, 20 nt, Artificial Sequence
  spacer sequence TTCN PAM
uuuuuccaaaaaaaaaagaa

SEQ ID NO: 41432 - RNA, 20 nt, Artificial Sequence
  spacer sequence TTCN PAM
aaaaaaaaaagaaaaaaaaa

SEQ ID NO: 41433 - RNA, 20 nt, Artificial Sequence
  spacer sequence TTCN PAM
uuuuuuuuuggaaaaaugaa

SEQ ID NO: 41434 - RNA, 20 nt, Artificial Sequence
  spacer sequence TTCN PAM
auuuuuuuuucuuuuuuuuu

SEQ ID NO: 41435 - RNA, 20 nt, Artificial Sequence
  spacer sequence TTCN PAM
aaaaacaaacccgccccuuu

SEQ ID NO: 41436 - RNA, 20 nt, Artificial Sequence
  spacer sequence TTCN PAM
ucaaaaaacaaacccgcccc

SEQ ID NO: 41437 - RNA, 20 nt, Artificial Sequence
  spacer sequence TTCN PAM
guuuuguuuuuuaacgauuu

SEQ ID NO: 41438 - RNA, 20 nt, Artificial Sequence
  spacer sequence TTCN PAM
acccucaaccaguggaggca

SEQ ID NO: 41439 - RNA, 20 nt, Artificial Sequence
  spacer sequence TTCN PAM
ugccuggagguuccacccuc

SEQ ID NO: 41440 - RNA, 20 nt, Artificial Sequence
  spacer sequence TTCN PAM
ugggcagcccuuaccgggca

SEQ ID NO: 41441 - RNA, 20 nt, Artificial Sequence
  spacer sequence TTCN PAM
uguaugaaaacauaaaauug

SEQ ID NO: 41442 - RNA, 20 nt, Artificial Sequence
  spacer sequence TTCN PAM
uacaugaaacucacgccagg

SEQ ID NO: 41443 - RNA, 20 nt, Artificial Sequence
  spacer sequence TTCN PAM
auuuuauguuuucauacaug

SEQ ID NO: 41444 - RNA, 20 nt, Artificial Sequence
  spacer sequence TTCN PAM
aguaauaaacagaaaaugaa

SEQ ID NO: 41445 - RNA, 20 nt, Artificial Sequence
  spacer sequence TTCN PAM
guuuauuacuugaaaucacg

SEQ ID NO: 41446 - RNA, 20 nt, Artificial Sequence
  spacer sequence TTCN PAM
uuuucuguuuauuacuugaa

SEQ ID NO: 41447 - RNA, 20 nt, Artificial Sequence
  spacer sequence TTCN PAM
uggggugggaugucagcuca

SEQ ID NO: 41448 - RNA, 20 nt, Artificial Sequence
  spacer sequence TTCN PAM
gggccuugggacccagguca

SEQ ID NO: 41449 - RNA, 20 nt, Artificial Sequence
  spacer sequence TTCN PAM
cagggcccugaccccugccc

SEQ ID NO: 41450 - RNA, 20 nt, Artificial Sequence
  spacer sequence TTCN PAM
cacgcuccuuccccggcugc

SEQ ID NO: 41451 - RNA, 20 nt, Artificial Sequence
  spacer sequence TTCN PAM
ccggcugccgggugggcagg

SEQ ID NO: 41452 - RNA, 20 nt, Artificial Sequence
  spacer sequence TTCN PAM
ugcccacccggcagccgggg

SEQ ID NO: 41453 - RNA, 20 nt, Artificial Sequence
  spacer sequence TTCN PAM
ugguacccaaggccggaagu

SEQ ID NO: 41454 - RNA, 20 nt, Artificial Sequence
  spacer sequence TTCN PAM
ggccuuggguaccaggaagu

SEQ ID NO: 41455 - RNA, 20 nt, Artificial Sequence
  spacer sequence TTCN PAM
uggccugggcaggacccugg

SEQ ID NO: 41456 - RNA, 20 nt, Artificial Sequence
  spacer sequence TTCN PAM
uggagucucacaucugugug

SEQ ID NO: 41457 - RNA, 20 nt, Artificial Sequence
  spacer sequence TTCN PAM
agcccuucccagaccuggcc

SEQ ID NO: 41458 - RNA, 20 nt, Artificial Sequence
  spacer sequence TTCN PAM
cagaccuggccuucagcucc

SEQ ID NO: 41459 - RNA, 20 nt, Artificial Sequence
  spacer sequence TTCN PAM
gcuccaaaccucccggccuu

SEQ ID NO: 41460 - RNA, 20 nt, Artificial Sequence
  spacer sequence TTCN PAM
uagacagggggcaaaggccg

SEQ ID NO: 41461 - RNA, 20 nt, Artificial Sequence
  spacer sequence TTCN PAM
cagacagcaagggacagccg

SEQ ID NO: 41462 - RNA, 20 nt, Artificial Sequence
  spacer sequence TTCN PAM
ccagccugcgccuuccaccc

SEQ ID NO: 41463 - RNA, 20 nt, Artificial Sequence
  spacer sequence TTCN PAM
accccuguccaccccguccc

SEQ ID NO: 41464 - RNA, 20 nt, Artificial Sequence
  spacer sequence TTCN PAM
cucucucugucccuagccug

SEQ ID NO: 41465 - RNA, 20 nt, Artificial Sequence
  spacer sequence TTCN PAM
ugucuuuuuuuaaauuuugu

SEQ ID NO: 41466 - RNA, 20 nt, Artificial Sequence
  spacer sequence TTCN PAM
ucagguaacaagaguugccu

SEQ ID NO: 41467 - RNA, 20 nt, Artificial Sequence
  spacer sequence TTCN PAM
cauaggcaacucuuguuacc

SEQ ID NO: 41468 - RNA, 20 nt, Artificial Sequence
  spacer sequence TTCN PAM
cccaucuauaaaaugggagc

SEQ ID NO: 41469 - RNA, 20 nt, Artificial Sequence
  spacer sequence TTCN PAM
ucuuugggccucuguucucc

SEQ ID NO: 41470 - RNA, 20 nt, Artificial Sequence
  spacer sequence TTCN PAM
augaugugaccuccaccccu

SEQ ID NO: 41471 - RNA, 20 nt, Artificial Sequence
  spacer sequence TTCN PAM
ccugggggcucccgguacug

SEQ ID NO: 41472 - RNA, 20 nt, Artificial Sequence
  spacer sequence TTCN PAM
gagaguggccugggagcacc

SEQ ID NO: 41473 - RNA, 20 nt, Artificial Sequence
  spacer sequence TTCN PAM
ugagaccccucugccccucc

SEQ ID NO: 41474 - RNA, 20 nt, Artificial Sequence
  spacer sequence TTCN PAM
ugccgugggcgugcgaugau

SEQ ID NO: 41475 - RNA, 20 nt, Artificial Sequence
  spacer sequence TTCN PAM
caccccgcccagcgaggggg

SEQ ID NO: 41476 - RNA, 20 nt, Artificial Sequence
  spacer sequence TTCN PAM
uccuucccaccccgcccagc

SEQ ID NO: 41477 - RNA, 20 nt, Artificial Sequence
  spacer sequence TTCN PAM
gacaacauccuccuuccucc

SEQ ID NO: 41478 - RNA, 20 nt, Artificial Sequence
  spacer sequence TTCN PAM
gcaggugcuucagacaacau

SEQ ID NO: 41479 - RNA, 20 nt, Artificial Sequence
  spacer sequence TTCN PAM
cuacgcacacuuggccuccg

SEQ ID NO: 41480 - RNA, 20 nt, Artificial Sequence
  spacer sequence TTCN PAM
cccaaccauugaggaaaaag

SEQ ID NO: 41481 - RNA, 20 nt, Artificial Sequence
  spacer sequence TTCN PAM
ucaaugguugggggaaggga

SEQ ID NO: 41482 - RNA, 20 nt, Artificial Sequence
  spacer sequence TTCN PAM
gcuuuuuccucaaugguugg

SEQ ID NO: 41483 - RNA, 20 nt, Artificial Sequence
  spacer sequence TTCN PAM
gggggccgcccccucccauu

SEQ ID NO: 41484 - RNA, 20 nt, Artificial Sequence
  spacer sequence TTCN PAM
aucccggcggguuuccgggg

SEQ ID NO: 41485 - RNA, 20 nt, Artificial Sequence
  spacer sequence TTCN PAM
agggcaacgcgccgcgaaag

SEQ ID NO: 41486 - RNA, 20 nt, Artificial Sequence
  spacer sequence TTCN PAM
cggcgcguugcccuggaaac

SEQ ID NO: 41487 - RNA, 20 nt, Artificial Sequence
  spacer sequence TTCN PAM
ccgcuggugggcggggccug

SEQ ID NO: 41488 - RNA, 20 nt, Artificial Sequence
  spacer sequence TTCN PAM
ucgcgcugcuacuggggcac

SEQ ID NO: 41489 - RNA, 20 nt, Artificial Sequence
  spacer sequence TTCN PAM
ggaggcuucgucgcgcugcu

SEQ ID NO: 41490 - RNA, 20 nt, Artificial Sequence
  spacer sequence TTCN PAM
gcccggcagcgccgagugcg

SEQ ID NO: 41491 - RNA, 20 nt, Artificial Sequence
  spacer sequence TTCN PAM
guccaggccccgccgcagcc

SEQ ID NO: 41492 - RNA, 20 nt, Artificial Sequence
  spacer sequence TTCN PAM
cgccaacgcguuuccugcug

SEQ ID NO: 41493 - RNA, 20 nt, Artificial Sequence
  spacer sequence TTCN PAM
ugcugcccccaccccugcac

SEQ ID NO: 41494 - RNA, 20 nt, Artificial Sequence
  spacer sequence TTCN PAM
uacaacacuuggcaaacucc

SEQ ID NO: 41495 - RNA, 20 nt, Artificial Sequence
  spacer sequence TTCN PAM
cgcuuccuacaacacuuggc

SEQ ID NO: 41496 - RNA, 20 nt, Artificial Sequence
  spacer sequence TTCN PAM
gggccuuggcacacgccgug

SEQ ID NO: 41497 - RNA, 20 nt, Artificial Sequence
  spacer sequence TTCN PAM
cguuuccgggccuuggcaca

SEQ ID NO: 41498 - RNA, 20 nt, Artificial Sequence
  spacer sequence TTCN PAM
ggggcaaccgggaagucagu

SEQ ID NO: 41499 - RNA, 20 nt, Artificial Sequence
  spacer sequence TTCN PAM
cgguugcccccgaaaagcac

SEQ ID NO: 41500 - RNA, 20 nt, Artificial Sequence
  spacer sequence TTCN PAM
ccaccaacugacuucccggu

SEQ ID NO: 41501 - RNA, 20 nt, Artificial Sequence
  spacer sequence TTCN PAM
ucccaucuuugauuuuucuc

SEQ ID NO: 41502 - RNA, 20 nt, Artificial Sequence
  spacer sequence TTCN PAM
ccaagucggccacuggaggg

SEQ ID NO: 41503 - RNA, 20 nt, Artificial Sequence
  spacer sequence TTCN PAM
ucucuggucccccaagucau

SEQ ID NO: 41504 - RNA, 20 nt, Artificial Sequence
  spacer sequence TTCN PAM
ucucuaccucccccagggug

SEQ ID NO: 41505 - RNA, 20 nt, Artificial Sequence
  spacer sequence TTCN PAM
uuuuucgucucuaccucccc

SEQ ID NO: 41506 - RNA, 20 nt, Artificial Sequence
  spacer sequence TTCN PAM
gggcacaccguaguuccuuu

SEQ ID NO: 41507 - RNA, 20 nt, Artificial Sequence
  spacer sequence TTCN PAM
cccuguuacccccgccuugc

SEQ ID NO: 41508 - RNA, 20 nt, Artificial Sequence
  spacer sequence TTCN PAM
ccuucccccuguuacccccg

SEQ ID NO: 41509 - RNA, 20 nt, Artificial Sequence
  spacer sequence TTCN PAM
gauuuucuccuucccccugu

SEQ ID NO: 41510 - RNA, 20 nt, Artificial Sequence
  spacer sequence TTCN PAM
ugccuccugaguccucaacu

SEQ ID NO: 41511 - RNA, 20 nt, Artificial Sequence
  spacer sequence TTCN PAM
cugagcacacaccaaguugg

SEQ ID NO: 41512 - RNA, 20 nt, Artificial Sequence
  spacer sequence TTCN PAM
cuccaaccacugccuucucu

SEQ ID NO: 41513 - RNA, 20 nt, Artificial Sequence
  spacer sequence TTCN PAM
caggccgcuccagaggccag

SEQ ID NO: 41514 - RNA, 20 nt, Artificial Sequence
  spacer sequence TTCN PAM
cagggugggagcugcccugu

SEQ ID NO: 41515 - RNA, 20 nt, Artificial Sequence
  spacer sequence TTCN PAM
ccugcccgcccacagcuccg

SEQ ID NO: 41516 - RNA, 20 nt, Artificial Sequence
  spacer sequence TTCN PAM
gccacccccagaggacuccg

SEQ ID NO: 41517 - RNA, 20 nt, Artificial Sequence
  spacer sequence TTCN PAM
acugcuguccacccuagcca

SEQ ID NO: 41518 - RNA, 20 nt, Artificial Sequence
  spacer sequence TTCN PAM
cauggugcugggagaggagg

SEQ ID NO: 41519 - RNA, 20 nt, Artificial Sequence
  spacer sequence TTCN PAM
agggcugggcggcccguggg

SEQ ID NO: 41520 - RNA, 20 nt, Artificial Sequence
  spacer sequence TTCN PAM
cugcccuuccagggcugggc

SEQ ID NO: 41521 - RNA, 20 nt, Artificial Sequence
  spacer sequence TTCN PAM
gguucucacucccuccauuu

SEQ ID NO: 41522 - RNA, 20 nt, Artificial Sequence
  spacer sequence TTCN PAM
cacucccuccauuucucuuu

SEQ ID NO: 41523 - RNA, 20 nt, Artificial Sequence
  spacer sequence TTCN PAM
cuuucuuuugccuuucucua

SEQ ID NO: 41524 - RNA, 20 nt, Artificial Sequence
  spacer sequence TTCN PAM
uuugccuuucucuauuucug

SEQ ID NO: 41525 - RNA, 20 nt, Artificial Sequence
  spacer sequence TTCN PAM
cuauuucugucccgaucucu

SEQ ID NO: 41526 - RNA, 20 nt, Artificial Sequence
  spacer sequence TTCN PAM
gucccgaucucuggcgcucu

SEQ ID NO: 41527 - RNA, 20 nt, Artificial Sequence
  spacer sequence TTCN PAM
gcccccucucugggggcccc

SEQ ID NO: 41528 - RNA, 20 nt, Artificial Sequence
  spacer sequence TTCN PAM
ccccggggcacauuccagcu

SEQ ID NO: 41529 - RNA, 20 nt, Artificial Sequence
  spacer sequence TTCN PAM
agcuuccucccccgccuugc

SEQ ID NO: 41530 - RNA, 20 nt, Artificial Sequence
  spacer sequence TTCN PAM
ucccccgccuugcagucccu

SEQ ID NO: 41531 - RNA, 20 nt, Artificial Sequence
  spacer sequence TTCN PAM
agagggguugggggugcccu

SEQ ID NO: 41532 - RNA, 20 nt, Artificial Sequence
  spacer sequence TTCN PAM
acggagggcacaugccccau

SEQ ID NO: 41533 - RNA, 20 nt, Artificial Sequence
  spacer sequence TTCN PAM
guuuguuuuagggucacaca

SEQ ID NO: 41534 - RNA, 20 nt, Artificial Sequence
  spacer sequence TTCN PAM
cccacaaccaacacacgccu

SEQ ID NO: 41535 - RNA, 20 nt, Artificial Sequence
  spacer sequence TTCN PAM
ugcccccgcccaggcgugug

SEQ ID NO: 41536 - RNA, 20 nt, Artificial Sequence
  spacer sequence TTCN PAM
caggcgagccccaaccuaug

SEQ ID NO: 41537 - RNA, 20 nt, Artificial Sequence
  spacer sequence TTCN PAM
aaaagucuuucugugcaugu

SEQ ID NO: 41538 - RNA, 20 nt, Artificial Sequence
  spacer sequence TTCN PAM
gugcauguuggaaauacaaa

SEQ ID NO: 41539 - RNA, 20 nt, Artificial Sequence
  spacer sequence TTCN PAM
aacaugcacagaaagacuuu

SEQ ID NO: 41540 - RNA, 20 nt, Artificial Sequence
  spacer sequence TTCN PAM
uuuguauuuccaacaugcac

SEQ ID NO: 41541 - RNA, 20 nt, Artificial Sequence
  spacer sequence TTCN PAM
agugauucuccugccucagc

SEQ ID NO: 41542 - RNA, 20 nt, Artificial Sequence
  spacer sequence TTCN PAM
ccugccucagccucuggagu

SEQ ID NO: 41543 - RNA, 20 nt, Artificial Sequence
  spacer sequence TTCN PAM
ccauguuggccaggcagguc

SEQ ID NO: 41544 - RNA, 20 nt, Artificial Sequence
  spacer sequence TTCN PAM
agaccugccuggccaacaug

SEQ ID NO: 41545 - RNA, 20 nt, Artificial Sequence
  spacer sequence TTCN PAM
cuacuaaaaauaaauaaaau

SEQ ID NO: 41546 - RNA, 20 nt, Artificial Sequence
  spacer sequence TTCN PAM
ccauguuggucaggcugguc

SEQ ID NO: 41547 - RNA, 20 nt, Artificial Sequence
  spacer sequence TTCN PAM
agacggggucucacucucuu

SEQ ID NO: 41548 - RNA, 20 nt, Artificial Sequence
  spacer sequence TTCN PAM
aggcuggaacgcaguggcuc

SEQ ID NO: 41549 - RNA, 20 nt, Artificial Sequence
  spacer sequence TTCN PAM
agccuggaaagagagugaga

SEQ ID NO: 41550 - RNA, 20 nt, Artificial Sequence
  spacer sequence TTCN PAM
agcgaggcugcagugagcug

SEQ ID NO: 41551 - RNA, 20 nt, Artificial Sequence
  spacer sequence TTCN PAM
uuugaguccaggaguuugau

SEQ ID NO: 41552 - RNA, 20 nt, Artificial Sequence
  spacer sequence TTCN PAM
aggcaugagccagcgcuccc

SEQ ID NO: 41553 - RNA, 20 nt, Artificial Sequence
  spacer sequence TTCN PAM
auguggacugccacaucaag

SEQ ID NO: 41554 - RNA, 20 nt, Artificial Sequence
  spacer sequence TTCN PAM
uugauguggcaguccacaug

SEQ ID NO: 41555 - RNA, 20 nt, Artificial Sequence
  spacer sequence TTCN PAM
uuguuguuugcuuccuugau

SEQ ID NO: 41556 - RNA, 20 nt, Artificial Sequence
  spacer sequence TTCN PAM
uaccaggucuucccugugcg

SEQ ID NO: 41557 - RNA, 20 nt, Artificial Sequence
  spacer sequence TTCN PAM
cugugcgccucuaaccccag

SEQ ID NO: 41558 - RNA, 20 nt, Artificial Sequence
  spacer sequence TTCN PAM
ucugagaggugggcaugcca

SEQ ID NO: 41559 - RNA, 20 nt, Artificial Sequence
  spacer sequence TTCN PAM
cacauccagacggacagacg

SEQ ID NO: 41560 - RNA, 20 nt, Artificial Sequence
  spacer sequence TTCN PAM
cuugcacuccguagguccug

SEQ ID NO: 41561 - RNA, 20 nt, Artificial Sequence
  spacer sequence TTCN PAM
ccacucucccaggcagcugc

SEQ ID NO: 41562 - RNA, 20 nt, Artificial Sequence
  spacer sequence TTCN PAM
ugcaaagccaaccaggcuca

SEQ ID NO: 41563 - RNA, 20 nt, Artificial Sequence
  spacer sequence TTCN PAM
cucucaugggacuacacguc

SEQ ID NO: 41564 - RNA, 20 nt, Artificial Sequence
  spacer sequence TTCN PAM
caguuucagaaacuaggugg

SEQ ID NO: 41565 - RNA, 20 nt, Artificial Sequence
  spacer sequence TTCN PAM
gaaacuagguggcugcaucc

SEQ ID NO: 41566 - RNA, 20 nt, Artificial Sequence
  spacer sequence TTCN PAM
gaaacugggaaaaggucugg

SEQ ID NO: 41567 - RNA, 20 nt, Artificial Sequence
  spacer sequence TTCN PAM
cagacaccugaucugcacgu

SEQ ID NO: 41568 - RNA, 20 nt, Artificial Sequence
  spacer sequence TTCN PAM
gcuggggcgcagaccagcca

SEQ ID NO: 41569 - RNA, 20 nt, Artificial Sequence
  spacer sequence TTCN PAM
guacacaggauacugcagag

SEQ ID NO: 41570 - RNA, 20 nt, Artificial Sequence
  spacer sequence TTCN PAM
uacccacuggacacaaaguc

SEQ ID NO: 41571 - RNA, 20 nt, Artificial Sequence
  spacer sequence TTCN PAM
ugagcugugacucaggccug

SEQ ID NO: 41572 - RNA, 20 nt, Artificial Sequence
  spacer sequence TTCN PAM
cugugacucacccccucccc

SEQ ID NO: 41573 - RNA, 20 nt, Artificial Sequence
  spacer sequence TTCN PAM
cuucccugugacucaccccc

SEQ ID NO: 41574 - RNA, 20 nt, Artificial Sequence
  spacer sequence TTCN PAM
cagggugggucggcuucccu

SEQ ID NO: 41575 - RNA, 20 nt, Artificial Sequence
  spacer sequence TTCN PAM
ucggaugcguucgcagggug

SEQ ID NO: 41576 - RNA, 20 nt, Artificial Sequence
  spacer sequence TTCN PAM
cuccuguuccucggaugcgu

SEQ ID NO: 41577 - RNA, 20 nt, Artificial Sequence
  spacer sequence TTCN PAM
uguguagcagccccugaauc

SEQ ID NO: 41578 - RNA, 20 nt, Artificial Sequence
  spacer sequence TTCN PAM
ggggcugcuacacaggaaag

SEQ ID NO: 41579 - RNA, 20 nt, Artificial Sequence
  spacer sequence TTCN PAM
cccagcucccagcugagucc

SEQ ID NO: 41580 - RNA, 20 nt, Artificial Sequence
  spacer sequence TTCN PAM
ucuucugggcuucuggaacu

SEQ ID NO: 41581 - RNA, 20 nt, Artificial Sequence
  spacer sequence TTCN PAM
gggcuucuggaacucugggc

SEQ ID NO: 41582 - RNA, 20 nt, Artificial Sequence
  spacer sequence TTCN PAM
ggaacucugggcugcccugg

SEQ ID NO: 41583 - RNA, 20 nt, Artificial Sequence
  spacer sequence TTCN PAM
agaagcccagaagaggaagg

SEQ ID NO: 41584 - RNA, 20 nt, Artificial Sequence
  spacer sequence TTCN PAM
ugugucuuugcacacacgcg

SEQ ID NO: 41585 - RNA, 20 nt, Artificial Sequence
  spacer sequence TTCN PAM
uguccacacaagcuuguguc

SEQ ID NO: 41586 - RNA, 20 nt, Artificial Sequence
  spacer sequence TTCN PAM
gcgcccccgcggggcggccg

SEQ ID NO: 41587 - RNA, 20 nt, Artificial Sequence
  spacer sequence TTCN PAM
uccucggccacgcccgucgc

SEQ ID NO: 41588 - RNA, 20 nt, Artificial Sequence
  spacer sequence TTCN PAM
gagacggcaggcuggaaagg

SEQ ID NO: 41589 - RNA, 20 nt, Artificial Sequence
  spacer sequence TTCN PAM
agccugccgucucggaaggg

SEQ ID NO: 41590 - RNA, 20 nt, Artificial Sequence
  spacer sequence TTCN PAM
caaauccgcccccuuuccag

SEQ ID NO: 41591 - RNA, 20 nt, Artificial Sequence
  spacer sequence TTCN PAM
gggacucugacugauccccg

SEQ ID NO: 41592 - RNA, 20 nt, Artificial Sequence
  spacer sequence TTCN PAM
gggcccgacgcgcggggcuc

SEQ ID NO: 41593 - RNA, 20 nt, Artificial Sequence
  spacer sequence TTCN PAM
uccaccccugcuggccacug

SEQ ID NO: 41594 - RNA, 20 nt, Artificial Sequence
  spacer sequence TTCN PAM
agguguggaccugugucggu

SEQ ID NO: 41595 - RNA, 20 nt, Artificial Sequence
  spacer sequence TTCN PAM
caggguggcguugacacgca

SEQ ID NO: 41596 - RNA, 20 nt, Artificial Sequence
  spacer sequence TTCN PAM
ugggugcgggcuccgugagu

SEQ ID NO: 41597 - RNA, 20 nt, Artificial Sequence
  spacer sequence TTCN PAM
gccagugccuaguuauuaag

SEQ ID NO: 41598 - RNA, 20 nt, Artificial Sequence
  spacer sequence TTCN PAM
uucagccagugccuaguuau

SEQ ID NO: 41599 - RNA, 20 nt, Artificial Sequence
  spacer sequence TTCN PAM
uucauucagccagugccuag

SEQ ID NO: 41600 - RNA, 20 nt, Artificial Sequence
  spacer sequence TTCN PAM
uucauucauucagccagugc

SEQ ID NO: 41601 - RNA, 20 nt, Artificial Sequence
  spacer sequence TTCN PAM
uucauucauucauucagcca

SEQ ID NO: 41602 - RNA, 20 nt, Artificial Sequence
  spacer sequence TTCN PAM
uucauucauucauucauuca

SEQ ID NO: 41603 - RNA, 20 nt, Artificial Sequence
  spacer sequence TTCN PAM
caaaaccaggaaaaggcaga

SEQ ID NO: 41604 - RNA, 20 nt, Artificial Sequence
  spacer sequence TTCN PAM
ugguuuugcgaagcgccgug

SEQ ID NO: 41605 - RNA, 20 nt, Artificial Sequence
  spacer sequence TTCN PAM
gugagccucugccuuuuccu

SEQ ID NO: 41606 - RNA, 20 nt, Artificial Sequence
  spacer sequence TTCN PAM
cugguucugugagccucugc

SEQ ID NO: 41607 - RNA, 20 nt, Artificial Sequence
  spacer sequence TTCN PAM
ugccgcuccccccagcccau

SEQ ID NO: 41608 - RNA, 20 nt, Artificial Sequence
  spacer sequence TTCN PAM
cugacccagagcagcccuug

SEQ ID NO: 41609 - RNA, 20 nt, Artificial Sequence
  spacer sequence TTCN PAM
gaucugcgcccccagccccc

SEQ ID NO: 41610 - RNA, 20 nt, Artificial Sequence
  spacer sequence TTCN PAM
uucugaucugcgcccccagc

SEQ ID NO: 41611 - RNA, 20 nt, Artificial Sequence
  spacer sequence TTCN PAM
ggcccauucuuucugaucug

SEQ ID NO: 41612 - RNA, 20 nt, Artificial Sequence
  spacer sequence TTCN PAM
ucaccacccccucugcaccu

SEQ ID NO: 41613 - RNA, 20 nt, Artificial Sequence
  spacer sequence TTCN PAM
acccucaaguggaucgaggu

SEQ ID NO: 41614 - RNA, 20 nt, Artificial Sequence
  spacer sequence TTCN PAM
cugggaugagcagcaaagcg

SEQ ID NO: 41615 - RNA, 20 nt, Artificial Sequence
  spacer sequence TTCN PAM
cccagcuugucagcagaggg

SEQ ID NO: 41616 - RNA, 20 nt, Artificial Sequence
  spacer sequence TTCN PAM
gagggaugacccucugcuga

SEQ ID NO: 41617 - RNA, 20 nt, Artificial Sequence
  spacer sequence TTCN PAM
ggggcagagaggcagggguc

SEQ ID NO: 41618 - RNA, 20 nt, Artificial Sequence
  spacer sequence TTCN PAM
uccaccagggcugggggagg

SEQ ID NO: 41619 - RNA, 20 nt, Artificial Sequence
  spacer sequence TTCN PAM
accagggcugggggaggcgg

SEQ ID NO: 41620 - RNA, 20 nt, Artificial Sequence
  spacer sequence TTCN PAM
gcggccccaaagccucuggg

SEQ ID NO: 41621 - RNA, 20 nt, Artificial Sequence
  spacer sequence TTCN PAM
ccagauggcggcggcuuuaa

SEQ ID NO: 41622 - RNA, 20 nt, Artificial Sequence
  spacer sequence TTCN PAM
acaggccuccccuacugagc

SEQ ID NO: 41623 - RNA, 20 nt, Artificial Sequence
  spacer sequence TTCN PAM
cuccuuccacaggccucccc

SEQ ID NO: 41624 - RNA, 20 nt, Artificial Sequence
  spacer sequence TTCN PAM
agugggaguuaggcuugggu

SEQ ID NO: 41625 - RNA, 20 nt, Artificial Sequence
  spacer sequence TTCN PAM
uacaucgccacacuuuggug

SEQ ID NO: 41626 - RNA, 20 nt, Artificial Sequence
  spacer sequence TTCN PAM
uccuacaucgccacacuuug

SEQ ID NO: 41627 - RNA, 20 nt, Artificial Sequence
  spacer sequence TTCN PAM
caaucccaauucuuccuaca

SEQ ID NO: 41628 - RNA, 20 nt, Artificial Sequence
  spacer sequence TTCN PAM
caugaaugggguugucucug

SEQ ID NO: 41629 - RNA, 20 nt, Artificial Sequence
  spacer sequence TTCN PAM
ugcgaaccccaauauucgca

SEQ ID NO: 41630 - RNA, 20 nt, Artificial Sequence
  spacer sequence TTCN PAM
ugccaucaaccccaugccca

SEQ ID NO: 41631 - RNA, 20 nt, Artificial Sequence
  spacer sequence TTCN PAM
cagcaccccagcacuccauu

SEQ ID NO: 41632 - RNA, 20 nt, Artificial Sequence
  spacer sequence TTCN PAM
ugccaauacaaccgacgucc

SEQ ID NO: 41633 - RNA, 20 nt, Artificial Sequence
  spacer sequence TTCN PAM
gaugaaguugggaugucuga

SEQ ID NO: 41634 - RNA, 20 nt, Artificial Sequence
  spacer sequence TTCN PAM
ucugaaccccgacaccuguc

SEQ ID NO: 41635 - RNA, 20 nt, Artificial Sequence
  spacer sequence TTCN PAM
gggugucacugggaccccga

SEQ ID NO: 41636 - RNA, 20 nt, Artificial Sequence
  spacer sequence TTCN PAM
caggccucaggccucauggg

SEQ ID NO: 41637 - RNA, 20 nt, Artificial Sequence
  spacer sequence TTCN PAM
ccgccgcaggccagggagca

SEQ ID NO: 41638 - RNA, 20 nt, Artificial Sequence
  spacer sequence TTCN PAM
gcccccucccgcggacuggu

SEQ ID NO: 41639 - RNA, 20 nt, Artificial Sequence
  spacer sequence TTCN PAM
ugagcugggggccgagucua

SEQ ID NO: 41640 - RNA, 20 nt, Artificial Sequence
  spacer sequence TTCN PAM
gccgggccccgcccccuaca

SEQ ID NO: 41641 - RNA, 20 nt, Artificial Sequence
  spacer sequence TTCN PAM
cgcuugcgucagggaccugc

SEQ ID NO: 41642 - RNA, 20 nt, Artificial Sequence
  spacer sequence TTCN PAM
cugggcacagccucgagcuc

SEQ ID NO: 41643 - RNA, 20 nt, Artificial Sequence
  spacer sequence TTCN PAM
cggauggaguggcgcagggu

SEQ ID NO: 41644 - RNA, 20 nt, Artificial Sequence
  spacer sequence TTCN PAM
cggccuuggggcuggaggua

SEQ ID NO: 41645 - RNA, 20 nt, Artificial Sequence
  spacer sequence TTCN PAM
uccuuuucccauugcgauug

SEQ ID NO: 41646 - RNA, 20 nt, Artificial Sequence
  spacer sequence TTCN PAM
cauugcgauugcaugaggga

SEQ ID NO: 41647 - RNA, 20 nt, Artificial Sequence
  spacer sequence TTCN PAM
cucaugcaaucgcaauggga

SEQ ID NO: 41648 - RNA, 20 nt, Artificial Sequence
  spacer sequence TTCN PAM
agugugguuccucgucugcc

SEQ ID NO: 41649 - RNA, 20 nt, Artificial Sequence
  spacer sequence TTCN PAM
ucgucugccacgucgugcuu

SEQ ID NO: 41650 - RNA, 20 nt, Artificial Sequence
  spacer sequence TTCN PAM
aagucuaguucucagagcca

SEQ ID NO: 41651 - RNA, 20 nt, Artificial Sequence
  spacer sequence TTCN PAM
cagagccacuggguggcggc

SEQ ID NO: 41652 - RNA, 20 nt, Artificial Sequence
  spacer sequence TTCN PAM
cagccagugaaugcuuuguc

SEQ ID NO: 41653 - RNA, 20 nt, Artificial Sequence
  spacer sequence TTCN PAM
cuggcugggaauggccgcca

SEQ ID NO: 41654 - RNA, 20 nt, Artificial Sequence
  spacer sequence TTCN PAM
ccuaaaugccacuuccccug

SEQ ID NO: 41655 - RNA, 20 nt, Artificial Sequence
  spacer sequence TTCN PAM
ccugccuggaaauccugccu

SEQ ID NO: 41656 - RNA, 20 nt, Artificial Sequence
  spacer sequence TTCN PAM
aggcaggggaaguggcauuu

SEQ ID NO: 41657 - RNA, 20 nt, Artificial Sequence
  spacer sequence TTCN PAM
ggggccaucccuucccgauu

SEQ ID NO: 41658 - RNA, 20 nt, Artificial Sequence
  spacer sequence TTCN PAM
cgauucccggccuagguccu

SEQ ID NO: 41659 - RNA, 20 nt, Artificial Sequence
  spacer sequence TTCN PAM
cggccuagguccuggcuaug

SEQ ID NO: 41660 - RNA, 20 nt, Artificial Sequence
  spacer sequence TTCN PAM
auagccaggaccuaggccgg

SEQ ID NO: 41661 - RNA, 20 nt, Artificial Sequence
  spacer sequence TTCN PAM
gcucacuguaaaaugccucc

SEQ ID NO: 41662 - RNA, 20 nt, Artificial Sequence
  spacer sequence TTCN PAM
gguccagcaacaaguagaug

SEQ ID NO: 41663 - RNA, 20 nt, Artificial Sequence
  spacer sequence TTCN PAM
gaaauaggagaaccugagag

SEQ ID NO: 41664 - RNA, 20 nt, Artificial Sequence
  spacer sequence TTCN PAM
gaacgggugccaacuccuac

SEQ ID NO: 41665 - RNA, 20 nt, Artificial Sequence
  spacer sequence TTCN PAM
ccuauuuccgaacgggugcc

SEQ ID NO: 41666 - RNA, 20 nt, Artificial Sequence
  spacer sequence TTCN PAM
aguugugcccugggcaggac

SEQ ID NO: 41667 - RNA, 20 nt, Artificial Sequence
  spacer sequence TTCN PAM
cccacagccuuccaguugug

SEQ ID NO: 41668 - RNA, 20 nt, Artificial Sequence
  spacer sequence TTCN PAM
acaaugggugucucccuucc

SEQ ID NO: 41669 - RNA, 20 nt, Artificial Sequence
  spacer sequence TTCN PAM
gucuuggggguggauggagu

SEQ ID NO: 41670 - RNA, 20 nt, Artificial Sequence
  spacer sequence TTCN PAM
aauaauuuacuccauccacc

SEQ ID NO: 41671 - RNA, 20 nt, Artificial Sequence
  spacer sequence TTCN PAM
uaauucaaauaauuuacucc

SEQ ID NO: 41672 - RNA, 20 nt, Artificial Sequence
  spacer sequence TTCN PAM
gaccagccugggcaacagag

SEQ ID NO: 41673 - RNA, 20 nt, Artificial Sequence
  spacer sequence TTCN PAM
ugggaggcugagguaggagg

SEQ ID NO: 41674 - RNA, 20 nt, Artificial Sequence
  spacer sequence TTCN PAM
uuaucucaaacucauaccua

SEQ ID NO: 41675 - RNA, 20 nt, Artificial Sequence
  spacer sequence TTCN PAM
aauauuuccccuaaaaaaca

SEQ ID NO: 41676 - RNA, 20 nt, Artificial Sequence
  spacer sequence TTCN PAM
ccuaaaaaacacaugucauu

SEQ ID NO: 41677 - RNA, 20 nt, Artificial Sequence
  spacer sequence TTCN PAM
uauuuuauguaaaugacaug

SEQ ID NO: 41678 - RNA, 20 nt, Artificial Sequence
  spacer sequence TTCN PAM
uuggugucugccacaggccg

SEQ ID NO: 41679 - RNA, 20 nt, Artificial Sequence
  spacer sequence TTCN PAM
ucugaugccauggcggccug

SEQ ID NO: 41680 - RNA, 20 nt, Artificial Sequence
  spacer sequence TTCN PAM
caaaguacggacagaucucu

SEQ ID NO: 41681 - RNA, 20 nt, Artificial Sequence
  spacer sequence TTCN PAM
gagaucuguccguacuuuga

SEQ ID NO: 41682 - RNA, 20 nt, Artificial Sequence
  spacer sequence TTCN PAM
agguaggaggagcacaagcc

SEQ ID NO: 41683 - RNA, 20 nt, Artificial Sequence
  spacer sequence TTCN PAM
caaccaccacugugcagggg

SEQ ID NO: 41684 - RNA, 20 nt, Artificial Sequence
  spacer sequence TTCN PAM
caaaggugacaaacccaaau

SEQ ID NO: 41685 - RNA, 20 nt, Artificial Sequence
  spacer sequence TTCN PAM
uggccaucauggcauccuua

SEQ ID NO: 41686 - RNA, 20 nt, Artificial Sequence
  spacer sequence TTCN PAM
cauucauggccaucauggca

SEQ ID NO: 41687 - RNA, 20 nt, Artificial Sequence
  spacer sequence TTCN PAM
uccgugggggccgaggacgg

SEQ ID NO: 41688 - RNA, 20 nt, Artificial Sequence
  spacer sequence TTCN PAM
gugggggccgaggacggggc

SEQ ID NO: 41689 - RNA, 20 nt, Artificial Sequence
  spacer sequence TTCN PAM
cuagaggugagugccaugag

SEQ ID NO: 41690 - RNA, 20 nt, Artificial Sequence
  spacer sequence TTCN PAM
uguaugugcaggaggagggg

SEQ ID NO: 41691 - RNA, 20 nt, Artificial Sequence
  spacer sequence TTCN PAM
ccccauagccucgguccccu

SEQ ID NO: 41692 - RNA, 20 nt, Artificial Sequence
  spacer sequence TTCN PAM
aguccaggagugggggcuac

SEQ ID NO: 41693 - RNA, 20 nt, Artificial Sequence
  spacer sequence TTCN PAM
gucccgggucccaggucccu

SEQ ID NO: 41694 - RNA, 20 nt, Artificial Sequence
  spacer sequence TTCN PAM
cagaagcgggagggccuggg

SEQ ID NO: 41695 - RNA, 20 nt, Artificial Sequence
  spacer sequence TTCN PAM
gcgaauguccugagcagucu

SEQ ID NO: 41696 - RNA, 20 nt, Artificial Sequence
  spacer sequence TTCN PAM
aaaucuccaccagccugucc

SEQ ID NO: 41697 - RNA, 20 nt, Artificial Sequence
  spacer sequence TTCN PAM
aagaugcugcccugcugggg

SEQ ID NO: 41698 - RNA, 20 nt, Artificial Sequence
  spacer sequence TTCN PAM
ggggacacaacaaggacccc

SEQ ID NO: 41699 - RNA, 20 nt, Artificial Sequence
  spacer sequence TTCN PAM
gcucugccacaacaggcuga

SEQ ID NO: 41700 - RNA, 20 nt, Artificial Sequence
  spacer sequence TTCN PAM
gguacucaacguuugucugu

SEQ ID NO: 41701 - RNA, 20 nt, Artificial Sequence
  spacer sequence TTCN PAM
ccuuggugcccucuccaagc

SEQ ID NO: 41702 - RNA, 20 nt, Artificial Sequence
  spacer sequence TTCN PAM
gggcaagcacagugacaagg

SEQ ID NO: 41703 - RNA, 20 nt, Artificial Sequence
  spacer sequence TTCN PAM
aucgcaggacgcaaaagcca

SEQ ID NO: 41704 - RNA, 20 nt, Artificial Sequence
  spacer sequence TTCN PAM
ccccagaggccagaccaggg

SEQ ID NO: 41705 - RNA, 20 nt, Artificial Sequence
  spacer sequence TTCN PAM
gugccuuuacacugugccug

SEQ ID NO: 41706 - RNA, 20 nt, Artificial Sequence
  spacer sequence TTCN PAM
uguccucagcuacacacaac

SEQ ID NO: 41707 - RNA, 20 nt, Artificial Sequence
  spacer sequence TTCN PAM
ugcucaagaucguccuucca

SEQ ID NO: 41708 - RNA, 20 nt, Artificial Sequence
  spacer sequence TTCN PAM
aauggcuguguguuuaaaga

SEQ ID NO: 41709 - RNA, 20 nt, Artificial Sequence
  spacer sequence TTCN PAM
cugaacguuaauguguagua

SEQ ID NO: 41710 - RNA, 20 nt, Artificial Sequence
  spacer sequence TTCN PAM
gcgaagcucccacaaucuuu

SEQ ID NO: 41711 - RNA, 20 nt, Artificial Sequence
  spacer sequence TTCN PAM
cacuuucguagucauuucgg

SEQ ID NO: 41712 - RNA, 20 nt, Artificial Sequence
  spacer sequence TTCN PAM
uagucauuucgguucugauc

SEQ ID NO: 41713 - RNA, 20 nt, Artificial Sequence
  spacer sequence TTCN PAM
guucugaucuugucaaaccc

SEQ ID NO: 41714 - RNA, 20 nt, Artificial Sequence
  spacer sequence TTCN PAM
gaucuugucaaacccagccu

SEQ ID NO: 41715 - RNA, 20 nt, Artificial Sequence
  spacer sequence TTCN PAM
gacgccgggauggccucguu

SEQ ID NO: 41716 - RNA, 20 nt, Artificial Sequence
  spacer sequence TTCN PAM
uuuuaaggaagugcuguuuu

SEQ ID NO: 41717 - RNA, 20 nt, Artificial Sequence
  spacer sequence TTCN PAM
uuaaaaagaaaagucuagua

SEQ ID NO: 41718 - RNA, 20 nt, Artificial Sequence
  spacer sequence TTCN PAM
aaacauuuugaaaagcauuu

SEQ ID NO: 41719 - RNA, 20 nt, Artificial Sequence
  spacer sequence TTCN PAM
aaauguuuugaaaacccuca

SEQ ID NO: 41720 - RNA, 20 nt, Artificial Sequence
  spacer sequence TTCN PAM
aaaaaaucggggguugugug

SEQ ID NO: 41721 - RNA, 20 nt, Artificial Sequence
  spacer sequence TTCN PAM
uggggccaaccccacuaaaa

SEQ ID NO: 41722 - RNA, 20 nt, Artificial Sequence
  spacer sequence TTCN PAM
cugagaucgaacggacugug

SEQ ID NO: 41723 - RNA, 20 nt, Artificial Sequence
  spacer sequence TTCN PAM
aucucagagaagugaguggg

SEQ ID NO: 41724 - RNA, 20 nt, Artificial Sequence
  spacer sequence TTCN PAM
caguccguucgaucucagag

SEQ ID NO: 41725 - RNA, 20 nt, Artificial Sequence
  spacer sequence TTCN PAM
gacaaagagcggauucacag

SEQ ID NO: 41726 - RNA, 20 nt, Artificial Sequence
  spacer sequence TTCN PAM
aacuccgugugacguuucug

SEQ ID NO: 41727 - RNA, 20 nt, Artificial Sequence
  spacer sequence TTCN PAM
gaguguagugugguaggacc

SEQ ID NO: 41728 - RNA, 20 nt, Artificial Sequence
  spacer sequence TTCN PAM
ugaagauguuuauuuauauu

SEQ ID NO: 41729 - RNA, 20 nt, Artificial Sequence
  spacer sequence TTCN PAM
agaaccucucagggacgucu

SEQ ID NO: 41730 - RNA, 20 nt, Artificial Sequence
  spacer sequence TTCN PAM
aguaaaaaaggacaauauaa

SEQ ID NO: 41731 - RNA, 20 nt, Artificial Sequence
  spacer sequence TTCN PAM
ucagccacugcaaauacaac

SEQ ID NO: 41732 - RNA, 20 nt, Artificial Sequence
  spacer sequence TTCN PAM
uguacgcaguuuucuuuggc

SEQ ID NO: 41733 - RNA, 20 nt, Artificial Sequence
  spacer sequence TTCN PAM
uuggcuuuacgaagccgauu

SEQ ID NO: 41734 - RNA, 20 nt, Artificial Sequence
  spacer sequence TTCN PAM
uaaagccaaagaaaacugcg

SEQ ID NO: 41735 - RNA, 20 nt, Artificial Sequence
  spacer sequence TTCN PAM
cacggucuuuuaaucggcuu

SEQ ID NO: 41736 - RNA, 20 nt, Artificial Sequence
  spacer sequence TTCN PAM
uuucacacggucuuuuaauc

SEQ ID NO: 41737 - RNA, 20 nt, Artificial Sequence
  spacer sequence TTCN PAM
cuugcauugcaccacacacu

SEQ ID NO: 41738 - RNA, 20 nt, Artificial Sequence
  spacer sequence TTCN PAM
cucucugcucaggucuggcu

SEQ ID NO: 41739 - RNA, 20 nt, Artificial Sequence
  spacer sequence TTCN PAM
ccaccuucucucucugcuca

SEQ ID NO: 41740 - RNA, 20 nt, Artificial Sequence
  spacer sequence TTCN PAM
cuggggccugcagagcuaga

SEQ ID NO: 41741 - RNA, 20 nt, Artificial Sequence
  spacer sequence TTCN PAM
agcucugcaggccccaggga

SEQ ID NO: 41742 - RNA, 20 nt, Artificial Sequence
  spacer sequence TTCN PAM
ggcagugguggccagagggc

SEQ ID NO: 41743 - RNA, 20 nt, Artificial Sequence
  spacer sequence TTCN PAM
agacugaggcaguccagguc

SEQ ID NO: 41744 - RNA, 20 nt, Artificial Sequence
  spacer sequence TTCN PAM
gcuguugcuucacgaguucu

SEQ ID NO: 41745 - RNA, 20 nt, Artificial Sequence
  spacer sequence TTCN PAM
cgaguucugagcauucucug

SEQ ID NO: 41746 - RNA, 20 nt, Artificial Sequence
  spacer sequence TTCN PAM
gagcauucucugcuagccua

SEQ ID NO: 41747 - RNA, 20 nt, Artificial Sequence
  spacer sequence TTCN PAM
cugcuagccuauggaagcug

SEQ ID NO: 41748 - RNA, 20 nt, Artificial Sequence
  spacer sequence TTCN PAM
auaggcuagcagagaaugcu

SEQ ID NO: 41749 - RNA, 20 nt, Artificial Sequence
  spacer sequence TTCN PAM
guccuccgagggcugcagcu

SEQ ID NO: 41750 - RNA, 20 nt, Artificial Sequence
  spacer sequence TTCN PAM
guugggcgcacaacacuucu

SEQ ID NO: 41751 - RNA, 20 nt, Artificial Sequence
  spacer sequence TTCN PAM
acauaugagcuagccaaggg

SEQ ID NO: 41752 - RNA, 20 nt, Artificial Sequence
  spacer sequence TTCN PAM
agguaacuccuuccgcucgu

SEQ ID NO: 41753 - RNA, 20 nt, Artificial Sequence
  spacer sequence TTCN PAM
gcucguguccacaucccucu

SEQ ID NO: 41754 - RNA, 20 nt, Artificial Sequence
  spacer sequence TTCN PAM
gugagcucucaacaagaggg

SEQ ID NO: 41755 - RNA, 20 nt, Artificial Sequence
  spacer sequence TTCN PAM
ccgggcacaugacuuucagu

SEQ ID NO: 41756 - RNA, 20 nt, Artificial Sequence
  spacer sequence TTCN PAM
ugugacuguuuuuuguuuuu

SEQ ID NO: 41757 - RNA, 20 nt, Artificial Sequence
  spacer sequence TTCN PAM
uuuuuuuuuuaacuuuguuu

SEQ ID NO: 41758 - RNA, 20 nt, Artificial Sequence
  spacer sequence TTCN PAM
auuaagcuggaacuaaaguc

SEQ ID NO: 41759 - RNA, 20 nt, Artificial Sequence
  spacer sequence TTCN PAM
agcuuaauugaaaaaaacaa

SEQ ID NO: 41760 - RNA, 20 nt, Artificial Sequence
  spacer sequence TTCN PAM
ucuaugagccaggcaugacu

SEQ ID NO: 41761 - RNA, 20 nt, Artificial Sequence
  spacer sequence TTCN PAM
auccugcuuaagggauuuca

SEQ ID NO: 41762 - RNA, 20 nt, Artificial Sequence
  spacer sequence TTCN PAM
cuggucuucaauccugcuua

SEQ ID NO: 41763 - RNA, 20 nt, Artificial Sequence
  spacer sequence TTCN PAM
agaccucuuuaagucacacu

SEQ ID NO: 41764 - RNA, 20 nt, Artificial Sequence
  spacer sequence TTCN PAM
cugaugucuguugccgccau

SEQ ID NO: 41765 - RNA, 20 nt, Artificial Sequence
  spacer sequence TTCN PAM
agagcccacacuggcccaca

SEQ ID NO: 41766 - RNA, 20 nt, Artificial Sequence
  spacer sequence TTCN PAM
uaggggcuguggcuguuucc

SEQ ID NO: 41767 - RNA, 20 nt, Artificial Sequence
  spacer sequence TTCN PAM
ggggaggccgggaggggcag

SEQ ID NO: 41768 - RNA, 20 nt, Artificial Sequence
  spacer sequence TTCN PAM
accugccaaagcaaagcagc

SEQ ID NO: 41769 - RNA, 20 nt, Artificial Sequence
  spacer sequence TTCN PAM
ccgaguccuggccgggcccc

SEQ ID NO: 41770 - RNA, 20 nt, Artificial Sequence
  spacer sequence TTCN PAM
ccuggaacaagagcuggagg

SEQ ID NO: 41771 - RNA, 20 nt, Artificial Sequence
  spacer sequence TTCN PAM
aggugaagucccuccuggga

SEQ ID NO: 41772 - RNA, 20 nt, Artificial Sequence
  spacer sequence TTCN PAM
ggaagaguggcauguggcgc

SEQ ID NO: 41773 - RNA, 20 nt, Artificial Sequence
  spacer sequence TTCN PAM
cgaaagcacuuacaggggac

SEQ ID NO: 41774 - RNA, 20 nt, Artificial Sequence
  spacer sequence TTCN PAM
gugaguccugcucucccgca

SEQ ID NO: 41775 - RNA, 20 nt, Artificial Sequence
  spacer sequence TTCN PAM
guguguguugggugcagggc

SEQ ID NO: 41776 - RNA, 20 nt, Artificial Sequence
  spacer sequence TTCN PAM
cccucccuuccuccuccuuc

SEQ ID NO: 41777 - RNA, 20 nt, Artificial Sequence
  spacer sequence TTCN PAM
uccuccuuccaggaggcgcu

SEQ ID NO: 41778 - RNA, 20 nt, Artificial Sequence
  spacer sequence TTCN PAM
aggaggcgcuucgccaguga

SEQ ID NO: 41779 - RNA, 20 nt, Artificial Sequence
  spacer sequence TTCN PAM
ccagugaggugcgggcucag

SEQ ID NO: 41780 - RNA, 20 nt, Artificial Sequence
  spacer sequence TTCN PAM
cagggcuccacaucguugug

SEQ ID NO: 41781 - RNA, 20 nt, Artificial Sequence
  spacer sequence TTCN PAM
aauaaagggccacgugugca

SEQ ID NO: 41782 - RNA, 20 nt, Artificial Sequence
  spacer sequence TTCN PAM
aauccgacuuucacagggcu

SEQ ID NO: 41783 - RNA, 20 nt, Artificial Sequence
  spacer sequence TTCN PAM
gggugcacacguggcccuuu

SEQ ID NO: 41784 - RNA, 20 nt, Artificial Sequence
  spacer sequence TTCN PAM
ggggggucugucggcggagc

SEQ ID NO: 41785 - RNA, 20 nt, Artificial Sequence
  spacer sequence TTCN PAM
aguggccccgcuccgccgac

SEQ ID NO: 41786 - RNA, 20 nt, Artificial Sequence
  spacer sequence TTCN PAM
uccaguggccccgcuccgcc

SEQ ID NO: 41787 - RNA, 20 nt, Artificial Sequence
  spacer sequence TTCN PAM
gcgcacgaguaggacccgac

SEQ ID NO: 41788 - RNA, 20 nt, Artificial Sequence
  spacer sequence TTCN PAM
cugucggguccuacucgugc

SEQ ID NO: 41789 - RNA, 20 nt, Artificial Sequence
  spacer sequence TTCN PAM
cagcgcggagacuccagucu

SEQ ID NO: 41790 - RNA, 20 nt, Artificial Sequence
  spacer sequence TTCN PAM
agggagcggcggccgcgcag

SEQ ID NO: 41791 - RNA, 20 nt, Artificial Sequence
  spacer sequence TTCN PAM
cuguagcaggcuugggagcg

SEQ ID NO: 41792 - RNA, 20 nt, Artificial Sequence
  spacer sequence TTCN PAM
ugggcccuggacguggccga

SEQ ID NO: 41793 - RNA, 20 nt, Artificial Sequence
  spacer sequence TTCN PAM
caguguccgugaggccgggg

SEQ ID NO: 41794 - RNA, 20 nt, Artificial Sequence
  spacer sequence TTCN PAM
gggcgacccccgccacuccu

SEQ ID NO: 41795 - RNA, 20 nt, Artificial Sequence
  spacer sequence TTCN PAM
cacccacuucggggcgaccc

SEQ ID NO: 41796 - RNA, 20 nt, Artificial Sequence
  spacer sequence TTCN PAM
ggaccucgggccgcucauuc

SEQ ID NO: 41797 - RNA, 20 nt, Artificial Sequence
  spacer sequence TTCN PAM
ucggaagccgcgacccccca

SEQ ID NO: 41798 - RNA, 20 nt, Artificial Sequence
  spacer sequence TTCN PAM
gaggaaaucgggcuggcagc

SEQ ID NO: 41799 - RNA, 20 nt, Artificial Sequence
  spacer sequence TTCN PAM
gggcucugccggcugcgccu

SEQ ID NO: 41800 - RNA, 20 nt, Artificial Sequence
  spacer sequence TTCN PAM
acgaagcaaguuccgcggcg

SEQ ID NO: 41801 - RNA, 20 nt, Artificial Sequence
  spacer sequence TTCN PAM
ucgaaccgcuccaagggauc

SEQ ID NO: 41802 - RNA, 20 nt, Artificial Sequence
  spacer sequence TTCN PAM
gcggcgggcgcgcggggcac

SEQ ID NO: 41803 - RNA, 20 nt, Artificial Sequence
  spacer sequence TTCN PAM
gccgggccauggggccgcgc

SEQ ID NO: 41804 - RNA, 20 nt, Artificial Sequence
  spacer sequence TTCN PAM
gcaccgcacggcagcgccgc

SEQ ID NO: 41805 - RNA, 20 nt, Artificial Sequence
  spacer sequence TTCN PAM
ucacggccggcggcggcgac

SEQ ID NO: 41806 - RNA, 20 nt, Artificial Sequence
  spacer sequence TTCN PAM
acgugauccugggcuucugc

SEQ ID NO: 41807 - RNA, 20 nt, Artificial Sequence
  spacer sequence TTCN PAM
gcggccugaccgcgcucuac

SEQ ID NO: 41808 - RNA, 20 nt, Artificial Sequence
  spacer sequence TTCN PAM
ugauccgggcguuuaggugc

SEQ ID NO: 41809 - RNA, 20 nt, Artificial Sequence
  spacer sequence TTCN PAM
cagguggggccacugaagcc

SEQ ID NO: 41810 - RNA, 20 nt, Artificial Sequence
  spacer sequence TTCN PAM
guggccccaccugggaaacg

SEQ ID NO: 41811 - RNA, 20 nt, Artificial Sequence
  spacer sequence TTCN PAM
caucuucccgccugccgcca

SEQ ID NO: 41812 - RNA, 20 nt, Artificial Sequence
  spacer sequence TTCN PAM
cgccugccgccaggccuuuc

SEQ ID NO: 41813 - RNA, 20 nt, Artificial Sequence
  spacer sequence TTCN PAM
guggggucccgauauuuucc

SEQ ID NO: 41814 - RNA, 20 nt, Artificial Sequence
  spacer sequence TTCN PAM
uuucugcuucuacccacuga

SEQ ID NO: 41815 - RNA, 20 nt, Artificial Sequence
  spacer sequence TTCN PAM
gcuucuacccacugaagcug

SEQ ID NO: 41816 - RNA, 20 nt, Artificial Sequence
  spacer sequence TTCN PAM
acccacugaagcugguucgu

SEQ ID NO: 41817 - RNA, 20 nt, Artificial Sequence
  spacer sequence TTCN PAM
guggguagaagcagaaagga

SEQ ID NO: 41818 - RNA, 20 nt, Artificial Sequence
  spacer sequence TTCN PAM
ucgccagggucggccacgug

SEQ ID NO: 41819 - RNA, 20 nt, Artificial Sequence
  spacer sequence TTCN PAM
gcguguucaggccaccccgg

SEQ ID NO: 41820 - RNA, 20 nt, Artificial Sequence
  spacer sequence TTCN PAM
ggccaccccggcuucccugg

SEQ ID NO: 41821 - RNA, 20 nt, Artificial Sequence
  spacer sequence TTCN PAM
cuggccuguggcuccagucu

SEQ ID NO: 41822 - RNA, 20 nt, Artificial Sequence
  spacer sequence TTCN PAM
cccgggugggagagacacag

SEQ ID NO: 41823 - RNA, 20 nt, Artificial Sequence
  spacer sequence TTCN PAM
gaccagcgcggguaacaugg

SEQ ID NO: 41824 - RNA, 20 nt, Artificial Sequence
  spacer sequence TTCN PAM
uuggccucccaaagugcugg

SEQ ID NO: 41825 - RNA, 20 nt, Artificial Sequence
  spacer sequence TTCN PAM
uguggaagcaccugcugcgc

SEQ ID NO: 41826 - RNA, 20 nt, Artificial Sequence
  spacer sequence TTCN PAM
acaggaagagguguggagca

SEQ ID NO: 41827 - RNA, 20 nt, Artificial Sequence
  spacer sequence TTCN PAM
auucuguugucuuuggcaaa

SEQ ID NO: 41828 - RNA, 20 nt, Artificial Sequence
  spacer sequence TTCN PAM
guugucuuuggcaaagucuc

SEQ ID NO: 41829 - RNA, 20 nt, Artificial Sequence
  spacer sequence TTCN PAM
ucagugcaaugggagugaca

SEQ ID NO: 41830 - RNA, 20 nt, Artificial Sequence
  spacer sequence TTCN PAM
uacugucaucgccaugggag

SEQ ID NO: 41831 - RNA, 20 nt, Artificial Sequence
  spacer sequence TTCN PAM
cucccauggcgaugacagua

SEQ ID NO: 41832 - RNA, 20 nt, Artificial Sequence
  spacer sequence TTCN PAM
uguccuaaucgccaagugau

SEQ ID NO: 41833 - RNA, 20 nt, Artificial Sequence
  spacer sequence TTCN PAM
uucauguccuaaucgccaag

SEQ ID NO: 41834 - RNA, 20 nt, Artificial Sequence
  spacer sequence TTCN PAM
cucaggacucucauugccgu

SEQ ID NO: 41835 - RNA, 20 nt, Artificial Sequence
  spacer sequence TTCN PAM
agguugaagaagccucagcg

SEQ ID NO: 41836 - RNA, 20 nt, Artificial Sequence
  spacer sequence TTCN PAM
accuggaaguagguccaggc

SEQ ID NO: 41837 - RNA, 20 nt, Artificial Sequence
  spacer sequence TTCN PAM
ucaaccuggaaguaggucca

SEQ ID NO: 41838 - RNA, 20 nt, Artificial Sequence
  spacer sequence TTCN PAM
gggacucaaacaccgucucc

SEQ ID NO: 41839 - RNA, 20 nt, Artificial Sequence
  spacer sequence TTCN PAM
ccagcucuggggccucggug

SEQ ID NO: 41840 - RNA, 20 nt, Artificial Sequence
  spacer sequence TTCN PAM
gaaggcugccggcaccaggg

SEQ ID NO: 41841 - RNA, 20 nt, Artificial Sequence
  spacer sequence TTCN PAM
gaagccccaucucagccagg

SEQ ID NO: 41842 - RNA, 20 nt, Artificial Sequence
  spacer sequence TTCN PAM
guaaugagaaauucuccccg

SEQ ID NO: 41843 - RNA, 20 nt, Artificial Sequence
  spacer sequence TTCN PAM
cauuacagaauaaauuggac

SEQ ID NO: 41844 - RNA, 20 nt, Artificial Sequence
  spacer sequence TTCN PAM
ccccgcauauuuuuagcuuc

SEQ ID NO: 41845 - RNA, 20 nt, Artificial Sequence
  spacer sequence TTCN PAM
uccuggcgucgcggccuuug

SEQ ID NO: 41846 - RNA, 20 nt, Artificial Sequence
  spacer sequence TTCN PAM
aaggccgcgacgccaggagg

SEQ ID NO: 41847 - RNA, 20 nt, Artificial Sequence
  spacer sequence TTCN PAM
ugagucuggguagaccccag

SEQ ID NO: 41848 - RNA, 20 nt, Artificial Sequence
  spacer sequence TTCN PAM
cagagugagccugauuucug

SEQ ID NO: 41849 - RNA, 20 nt, Artificial Sequence
  spacer sequence TTCN PAM
gacccuuggcuccacaggaa

SEQ ID NO: 41850 - RNA, 20 nt, Artificial Sequence
  spacer sequence TTCN PAM
uguggagccaagggucagaa

SEQ ID NO: 41851 - RNA, 20 nt, Artificial Sequence
  spacer sequence TTCN PAM
cuccuggggcugggagcugu

SEQ ID NO: 41852 - RNA, 20 nt, Artificial Sequence
  spacer sequence TTCN PAM
uggacccccacaguggcccc

SEQ ID NO: 41853 - RNA, 20 nt, Artificial Sequence
  spacer sequence TTCN PAM
ccagguccuuccucuaggag

SEQ ID NO: 41854 - RNA, 20 nt, Artificial Sequence
  spacer sequence TTCN PAM
ucuaggagcggccagcgggc

SEQ ID NO: 41855 - RNA, 20 nt, Artificial Sequence
  spacer sequence TTCN PAM
accuccccgcgcccgcuggc

SEQ ID NO: 41856 - RNA, 20 nt, Artificial Sequence
  spacer sequence TTCN PAM
cgucccugcuugggcucuga

SEQ ID NO: 41857 - RNA, 20 nt, Artificial Sequence
  spacer sequence TTCN PAM
ugucucucucaaggucagag

SEQ ID NO: 41858 - RNA, 20 nt, Artificial Sequence
  spacer sequence TTCN PAM
guucuugucucucucaaggu

SEQ ID NO: 41859 - RNA, 20 nt, Artificial Sequence
  spacer sequence TTCN PAM
uucuguucuugucucucuca

SEQ ID NO: 41860 - RNA, 20 nt, Artificial Sequence
  spacer sequence TTCN PAM
gcucaaauccguucagcggu

SEQ ID NO: 41861 - RNA, 20 nt, Artificial Sequence
  spacer sequence TTCN PAM
gcgguggcggugguggcggc

SEQ ID NO: 41862 - RNA, 20 nt, Artificial Sequence
  spacer sequence TTCN PAM
agcucccaccugugcagguc

SEQ ID NO: 41863 - RNA, 20 nt, Artificial Sequence
  spacer sequence TTCN PAM
caaaccaggacugggaccug

SEQ ID NO: 41864 - RNA, 20 nt, Artificial Sequence
  spacer sequence TTCN PAM
agggaucucgugggugagga

SEQ ID NO: 41865 - RNA, 20 nt, Artificial Sequence
  spacer sequence TTCN PAM
ggucccaggguagaaggaag

SEQ ID NO: 41866 - RNA, 20 nt, Artificial Sequence
  spacer sequence TTCN PAM
acccugggaccagaagcccc

SEQ ID NO: 41867 - RNA, 20 nt, Artificial Sequence
  spacer sequence TTCN PAM
uucuacccugggaccagaag

SEQ ID NO: 41868 - RNA, 20 nt, Artificial Sequence
  spacer sequence TTCN PAM
agaacucccaccuuugccag

SEQ ID NO: 41869 - RNA, 20 nt, Artificial Sequence
  spacer sequence TTCN PAM
ggaagcuuccuucuacccug

SEQ ID NO: 41870 - RNA, 20 nt, Artificial Sequence
  spacer sequence TTCN PAM
gagcagaguguggcggcugc

SEQ ID NO: 41871 - RNA, 20 nt, Artificial Sequence
  spacer sequence TTCN PAM
cgggcggcuccgucuggugg

SEQ ID NO: 41872 - RNA, 20 nt, Artificial Sequence
  spacer sequence TTCN PAM
ccagccugucugggcuacag

SEQ ID NO: 41873 - RNA, 20 nt, Artificial Sequence
  spacer sequence TTCN PAM
agccacacaaggcucuguag

SEQ ID NO: 41874 - RNA, 20 nt, Artificial Sequence
  spacer sequence TTCN PAM
cgcccuccacugaagagaca

SEQ ID NO: 41875 - RNA, 20 nt, Artificial Sequence
  spacer sequence TTCN PAM
guggagggcgugaaccuguc

SEQ ID NO: 41876 - RNA, 20 nt, Artificial Sequence
  spacer sequence TTCN PAM
accugggacgucuguagugg

SEQ ID NO: 41877 - RNA, 20 nt, Artificial Sequence
  spacer sequence TTCN PAM
gagcuccaggucucaucccc

SEQ ID NO: 41878 - RNA, 20 nt, Artificial Sequence
  spacer sequence TTCN PAM
cucuccuccagggagcucag

SEQ ID NO: 41879 - RNA, 20 nt, Artificial Sequence
  spacer sequence TTCN PAM
caguucucucuccuccaggg

SEQ ID NO: 41880 - RNA, 20 nt, Artificial Sequence
  spacer sequence TTCN PAM
ggaagagcaagauuuuaaca

SEQ ID NO: 41881 - RNA, 20 nt, Artificial Sequence
  spacer sequence TTCN PAM
agaaaggucugucccaccca

SEQ ID NO: 41882 - RNA, 20 nt, Artificial Sequence
  spacer sequence TTCN PAM
uguuaaaaucuugcucuucc

SEQ ID NO: 41883 - RNA, 20 nt, Artificial Sequence
  spacer sequence TTCN PAM
uccuguuaaaaucuugcucu

SEQ ID NO: 41884 - RNA, 20 nt, Artificial Sequence
  spacer sequence TTCN PAM
acuuuuucuuccuguuaaaa

SEQ ID NO: 41885 - RNA, 20 nt, Artificial Sequence
  spacer sequence TTCN PAM
cagcaggacccagccugaac

SEQ ID NO: 41886 - RNA, 20 nt, Artificial Sequence
  spacer sequence TTCN PAM
ggcuggguccugcugggaag

SEQ ID NO: 41887 - RNA, 20 nt, Artificial Sequence
  spacer sequence TTCN PAM
ccagcgggccacgcgggcca

SEQ ID NO: 41888 - RNA, 20 nt, Artificial Sequence
  spacer sequence TTCN PAM
cggucccugccaggaguuug

SEQ ID NO: 41889 - RNA, 20 nt, Artificial Sequence
  spacer sequence TTCN PAM
gguccaagggcuguuggugc

SEQ ID NO: 41890 - RNA, 20 nt, Artificial Sequence
  spacer sequence TTCN PAM
cucuccugcacugggccugg

SEQ ID NO: 41891 - RNA, 20 nt, Artificial Sequence
  spacer sequence TTCN PAM
ccaggcccagugcaggagag

SEQ ID NO: 41892 - RNA, 20 nt, Artificial Sequence
  spacer sequence TTCN PAM
gagacguacaacacgaucug

SEQ ID NO: 41893 - RNA, 20 nt, Artificial Sequence
  spacer sequence TTCN PAM
ugccacagccucccucacca

SEQ ID NO: 41894 - RNA, 20 nt, Artificial Sequence
  spacer sequence TTCN PAM
caaagugcuaggauuacagg

SEQ ID NO: 41895 - RNA, 20 nt, Artificial Sequence
  spacer sequence TTCN PAM
caccugggcuucccaaagug

SEQ ID NO: 41896 - RNA, 20 nt, Artificial Sequence
  spacer sequence TTCN PAM
agaccagcguggccaacaug

SEQ ID NO: 41897 - RNA, 20 nt, Artificial Sequence
  spacer sequence TTCN PAM
aaucuauagagacagugucu

SEQ ID NO: 41898 - RNA, 20 nt, Artificial Sequence
  spacer sequence TTCN PAM
ccaccugugucagccuacca

SEQ ID NO: 41899 - RNA, 20 nt, Artificial Sequence
  spacer sequence TTCN PAM
ccuccugguaggcugacaca

SEQ ID NO: 41900 - RNA, 20 nt, Artificial Sequence
  spacer sequence TTCN PAM
cugaacagaucagaccccgg

SEQ ID NO: 41901 - RNA, 20 nt, Artificial Sequence
  spacer sequence TTCN PAM
gggaacgccgagugauuucu

SEQ ID NO: 41902 - RNA, 20 nt, Artificial Sequence
  spacer sequence TTCN PAM
ugcguggagacugauuugcu

SEQ ID NO: 41903 - RNA, 20 nt, Artificial Sequence
  spacer sequence TTCN PAM
cucugggcuucuuggauccc

SEQ ID NO: 41904 - RNA, 20 nt, Artificial Sequence
  spacer sequence TTCN PAM
uggaucccauccccagcugc

SEQ ID NO: 41905 - RNA, 20 nt, Artificial Sequence
  spacer sequence TTCN PAM
cuggggauggaguaaguccc

SEQ ID NO: 41906 - RNA, 20 nt, Artificial Sequence
  spacer sequence TTCN PAM
gaggggcgcuggccaaaguc

SEQ ID NO: 41907 - RNA, 20 nt, Artificial Sequence
  spacer sequence TTCN PAM
agcgcuauccgcagccucac

SEQ ID NO: 41908 - RNA, 20 nt, Artificial Sequence
  spacer sequence TTCN PAM
gcgcgccccccgccggcauc

SEQ ID NO: 41909 - RNA, 20 nt, Artificial Sequence
  spacer sequence TTCN PAM
cggcgcccgaggucgcgcgc

SEQ ID NO: 41910 - RNA, 20 nt, Artificial Sequence
  spacer sequence TTCN PAM
ccgccuccuccgccgccgcc

SEQ ID NO: 41911 - RNA, 20 nt, Artificial Sequence
  spacer sequence TTCN PAM
cgcgcgccgaggacgccgcc

SEQ ID NO: 41912 - RNA, 20 nt, Artificial Sequence
  spacer sequence TTCN PAM
aguagacggcguagcggucc

SEQ ID NO: 41913 - RNA, 20 nt, Artificial Sequence
  spacer sequence TTCN PAM
cgcgggagccccccagggag

SEQ ID NO: 41914 - RNA, 20 nt, Artificial Sequence
  spacer sequence TTCN PAM
cgccugccuuccccggggcg

SEQ ID NO: 41915 - RNA, 20 nt, Artificial Sequence
  spacer sequence TTCN PAM
ccggggcgccccauugcccu

SEQ ID NO: 41916 - RNA, 20 nt, Artificial Sequence
  spacer sequence TTCN PAM
ccaaacuccaggagacgucg

SEQ ID NO: 41917 - RNA, 20 nt, Artificial Sequence
  spacer sequence TTCN PAM
cuggggagcccccucgguuu

SEQ ID NO: 41918 - RNA, 20 nt, Artificial Sequence
  spacer sequence TTCN PAM
cauuugguggggauccccgg

SEQ ID NO: 41919 - RNA, 20 nt, Artificial Sequence
  spacer sequence TTCN PAM
uccugcccgcagguccccag

SEQ ID NO: 41920 - RNA, 20 nt, Artificial Sequence
  spacer sequence TTCN PAM
ucuggggaccugcgggcagg

SEQ ID NO: 41921 - RNA, 20 nt, Artificial Sequence
  spacer sequence TTCN PAM
ccaaguucaucuggggaccu

SEQ ID NO: 41922 - RNA, 20 nt, Artificial Sequence
  spacer sequence TTCN PAM
cuccagggggccaagggccc

SEQ ID NO: 41923 - RNA, 20 nt, Artificial Sequence
  spacer sequence TTCN PAM
aagcugggcccuuggccccc

SEQ ID NO: 41924 - RNA, 20 nt, Artificial Sequence
  spacer sequence TTCN PAM
uggucagcgcccagaggaca

SEQ ID NO: 41925 - RNA, 20 nt, Artificial Sequence
  spacer sequence TTCN PAM
aaacaagggggccugcagca

SEQ ID NO: 41926 - RNA, 20 nt, Artificial Sequence
  spacer sequence TTCN PAM
ccugucccccacguugugcc

SEQ ID NO: 41927 - RNA, 20 nt, Artificial Sequence
  spacer sequence TTCN PAM
acccacguccaggccauggc

SEQ ID NO: 41928 - RNA, 20 nt, Artificial Sequence
  spacer sequence TTCN PAM
gaggguucuacccacgucca

SEQ ID NO: 41929 - RNA, 20 nt, Artificial Sequence
  spacer sequence TTCN PAM
cugggggucccgugggagcc

SEQ ID NO: 41930 - RNA, 20 nt, Artificial Sequence
  spacer sequence TTCN PAM
uaaggcacacggagcugcac

SEQ ID NO: 41931 - RNA, 20 nt, Artificial Sequence
  spacer sequence TTCN PAM
gcuacuggucacuuucucuc

SEQ ID NO: 41932 - RNA, 20 nt, Artificial Sequence
  spacer sequence TTCN PAM
cuccguuuuccagccgcuuc

SEQ ID NO: 41933 - RNA, 20 nt, Artificial Sequence
  spacer sequence TTCN PAM
agccgcuuccugugccgacc

SEQ ID NO: 41934 - RNA, 20 nt, Artificial Sequence
  spacer sequence TTCN PAM
ugugccgaccgagccgcccu

SEQ ID NO: 41935 - RNA, 20 nt, Artificial Sequence
  spacer sequence TTCN PAM
ucccggggaccgaggacagc

SEQ ID NO: 41936 - RNA, 20 nt, Artificial Sequence
  spacer sequence TTCN PAM
ugcaacuuuccucccgggga

SEQ ID NO: 41937 - RNA, 20 nt, Artificial Sequence
  spacer sequence TTCN PAM
gccguggggguggggaacac

SEQ ID NO: 41938 - RNA, 20 nt, Artificial Sequence
  spacer sequence TTCN PAM
ccacccccacggcggaacac

SEQ ID NO: 41939 - RNA, 20 nt, Artificial Sequence
  spacer sequence TTCN PAM
ccggcccaaguuuuugguuu

SEQ ID NO: 41940 - RNA, 20 nt, Artificial Sequence
  spacer sequence TTCN PAM
gcugcggaaucucccguccc

SEQ ID NO: 41941 - RNA, 20 nt, Artificial Sequence
  spacer sequence TTCN PAM
gcagcugaaaccaaaaacuu

SEQ ID NO: 41942 - RNA, 20 nt, Artificial Sequence
  spacer sequence TTCN PAM
agcaaacgccaaacacacga

SEQ ID NO: 41943 - RNA, 20 nt, Artificial Sequence
  spacer sequence TTCN PAM
ucccccgguugccggguccu

SEQ ID NO: 41944 - RNA, 20 nt, Artificial Sequence
  spacer sequence TTCN PAM
ccuggccggggguccggccc

SEQ ID NO: 41945 - RNA, 20 nt, Artificial Sequence
  spacer sequence TTCN PAM
uuccccuggccggggguccg

SEQ ID NO: 41946 - RNA, 20 nt, Artificial Sequence
  spacer sequence TTCN PAM
cucaggcagcgguuugagcu

SEQ ID NO: 41947 - RNA, 20 nt, Artificial Sequence
  spacer sequence TTCN PAM
ucuccugccugcgguaucca

SEQ ID NO: 41948 - RNA, 20 nt, Artificial Sequence
  spacer sequence TTCN PAM
cgggaagccgggauccagcc

SEQ ID NO: 41949 - RNA, 20 nt, Artificial Sequence
  spacer sequence TTCN PAM
cgggaaggugcucacccagc

SEQ ID NO: 41950 - RNA, 20 nt, Artificial Sequence
  spacer sequence TTCN PAM
ggcuggaucccggcuucccg

SEQ ID NO: 41951 - RNA, 20 nt, Artificial Sequence
  spacer sequence TTCN PAM
cagauuugguguccaggggc

SEQ ID NO: 41952 - RNA, 20 nt, Artificial Sequence
  spacer sequence TTCN PAM
cgcucugccugagagaccuc

SEQ ID NO: 41953 - RNA, 20 nt, Artificial Sequence
  spacer sequence TTCN PAM
uucagggacagcagaaccac

SEQ ID NO: 41954 - RNA, 20 nt, Artificial Sequence
  spacer sequence TTCN PAM
gggacagcagaaccaccaca

SEQ ID NO: 41955 - RNA, 20 nt, Artificial Sequence
  spacer sequence TTCN PAM
gcugucccugaaggaaugac

SEQ ID NO: 41956 - RNA, 20 nt, Artificial Sequence
  spacer sequence TTCN PAM
ucccuccaucucugacucug

SEQ ID NO: 41957 - RNA, 20 nt, Artificial Sequence
  spacer sequence TTCN PAM
gucucugucacugucucucc

SEQ ID NO: 41958 - RNA, 20 nt, Artificial Sequence
  spacer sequence TTCN PAM
cuguggcagaauuccgcucu

SEQ ID NO: 41959 - RNA, 20 nt, Artificial Sequence
  spacer sequence TTCN PAM
uccaaagcuucacuguggca

SEQ ID NO: 41960 - RNA, 20 nt, Artificial Sequence
  spacer sequence TTCN PAM
uccuuuucucuucuuuuccc

SEQ ID NO: 41961 - RNA, 20 nt, Artificial Sequence
  spacer sequence TTCN PAM
uuuucucuucuuuucccauc

SEQ ID NO: 41962 - RNA, 20 nt, Artificial Sequence
  spacer sequence TTCN PAM
cuucuuuucccaucacgggu

SEQ ID NO: 41963 - RNA, 20 nt, Artificial Sequence
  spacer sequence TTCN PAM
uuucccaucacggguugaga

SEQ ID NO: 41964 - RNA, 20 nt, Artificial Sequence
  spacer sequence TTCN PAM
caucacggguugagaaauug

SEQ ID NO: 41965 - RNA, 20 nt, Artificial Sequence
  spacer sequence TTCN PAM
caacccgugaugggaaaaga

SEQ ID NO: 41966 - RNA, 20 nt, Artificial Sequence
  spacer sequence TTCN PAM
ugugcccgcgugugcggggg

SEQ ID NO: 41967 - RNA, 20 nt, Artificial Sequence
  spacer sequence TTCN PAM
ggggccugcugccugccuga

SEQ ID NO: 41968 - RNA, 20 nt, Artificial Sequence
  spacer sequence TTCN PAM
cgccagaggccucucgucag

SEQ ID NO: 41969 - RNA, 20 nt, Artificial Sequence
  spacer sequence TTCN PAM
ccgaggcccaaggucaccac

SEQ ID NO: 41970 - RNA, 20 nt, Artificial Sequence
  spacer sequence TTCN PAM
acagcgggacaggggggucc

SEQ ID NO: 41971 - RNA, 20 nt, Artificial Sequence
  spacer sequence TTCN PAM
gggcugcggacucccggccc

SEQ ID NO: 41972 - RNA, 20 nt, Artificial Sequence
  spacer sequence TTCN PAM
uccaucuguaaagugggacc

SEQ ID NO: 41973 - RNA, 20 nt, Artificial Sequence
  spacer sequence TTCN PAM
cccggccugagucgcggggc

SEQ ID NO: 41974 - RNA, 20 nt, Artificial Sequence
  spacer sequence TTCN PAM
agccccgcgacucaggccgg

SEQ ID NO: 41975 - RNA, 20 nt, Artificial Sequence
  spacer sequence TTCN PAM
cagggcccgagcgcuccggc

SEQ ID NO: 41976 - RNA, 20 nt, Artificial Sequence
  spacer sequence TTCN PAM
uaaacucgaggcguccaggg

SEQ ID NO: 41977 - RNA, 20 nt, Artificial Sequence
  spacer sequence TTCN PAM
auccgggcggcuccgccguu

SEQ ID NO: 41978 - RNA, 20 nt, Artificial Sequence
  spacer sequence TTCN PAM
cggcccgugcacgcccggcg

SEQ ID NO: 41979 - RNA, 20 nt, Artificial Sequence
  spacer sequence TTCN PAM
ccgccgggcgugcacgggcc

SEQ ID NO: 41980 - RNA, 20 nt, Artificial Sequence
  spacer sequence TTCN PAM
ccgcgcaggcgcccccggcc

SEQ ID NO: 41981 - RNA, 20 nt, Artificial Sequence
  spacer sequence TTCN PAM
gcacaaaggucagccguaga

SEQ ID NO: 41982 - RNA, 20 nt, Artificial Sequence
  spacer sequence TTCN PAM
ccuuaagccuccaucuuuac

SEQ ID NO: 41983 - RNA, 20 nt, Artificial Sequence
  spacer sequence TTCN PAM
ccucccgaagaugccccgug

SEQ ID NO: 41984 - RNA, 20 nt, Artificial Sequence
  spacer sequence TTCN PAM
ggaggggaacugucuguucu

SEQ ID NO: 41985 - RNA, 20 nt, Artificial Sequence
  spacer sequence TTCN PAM
uggccucccagagccauccc

SEQ ID NO: 41986 - RNA, 20 nt, Artificial Sequence
  spacer sequence TTCN PAM
uuccuggccucccagagcca

SEQ ID NO: 41987 - RNA, 20 nt, Artificial Sequence
  spacer sequence TTCN PAM
aaccaaugagccucaggguu

SEQ ID NO: 41988 - RNA, 20 nt, Artificial Sequence
  spacer sequence TTCN PAM
uggcugugaaaugggaacaa

SEQ ID NO: 41989 - RNA, 20 nt, Artificial Sequence
  spacer sequence TTCN PAM
cagccaggaacccugaggcu

SEQ ID NO: 41990 - RNA, 20 nt, Artificial Sequence
  spacer sequence TTCN PAM
cauuucacagccaggaaccc

SEQ ID NO: 41991 - RNA, 20 nt, Artificial Sequence
  spacer sequence TTCN PAM
ggguaggcaucuccaggcug

SEQ ID NO: 41992 - RNA, 20 nt, Artificial Sequence
  spacer sequence TTCN PAM
cacaccagaccagccuggag

SEQ ID NO: 41993 - RNA, 20 nt, Artificial Sequence
  spacer sequence TTCN PAM
caccagccgggcacgguggc

SEQ ID NO: 41994 - RNA, 20 nt, Artificial Sequence
  spacer sequence TTCN PAM
cgccagccaggcacaguggc

SEQ ID NO: 41995 - RNA, 20 nt, Artificial Sequence
  spacer sequence TTCN PAM
cgccuguaaucccagcacuu

SEQ ID NO: 41996 - RNA, 20 nt, Artificial Sequence
  spacer sequence TTCN PAM
acuggagguuuugucugccu

SEQ ID NO: 41997 - RNA, 20 nt, Artificial Sequence
  spacer sequence TTCN PAM
caauuccacuggagguuuug

SEQ ID NO: 41998 - RNA, 20 nt, Artificial Sequence
  spacer sequence TTCN PAM
gcaugcauaucauuuaauuu

SEQ ID NO: 41999 - RNA, 20 nt, Artificial Sequence
  spacer sequence TTCN PAM
gcaaacucuguuuugcuagu

SEQ ID NO: 42000 - RNA, 20 nt, Artificial Sequence
  spacer sequence TTCN PAM
aucuugcuuaaauugauaag

SEQ ID NO: 42001 - RNA, 20 nt, Artificial Sequence
  spacer sequence TTCN PAM
cugacacacccucgauuuuc

SEQ ID NO: 42002 - RNA, 20 nt, Artificial Sequence
  spacer sequence TTCN PAM
cccuucccugacacacccuc

SEQ ID NO: 42003 - RNA, 20 nt, Artificial Sequence
  spacer sequence TTCN PAM
gcucaaacuucccccuuccc

SEQ ID NO: 42004 - RNA, 20 nt, Artificial Sequence
  spacer sequence TTCN PAM
caccccuaagaggucauaau

SEQ ID NO: 42005 - RNA, 20 nt, Artificial Sequence
  spacer sequence TTCN PAM
gcagaggagucgccgcgaug

SEQ ID NO: 42006 - RNA, 20 nt, Artificial Sequence
  spacer sequence TTCN PAM
ggauugguccagcugccucg

SEQ ID NO: 42007 - RNA, 20 nt, Artificial Sequence
  spacer sequence TTCN PAM
uucaggauugguccagcugc

SEQ ID NO: 42008 - RNA, 20 nt, Artificial Sequence
  spacer sequence TTCN PAM
gccgaaacccgggaucgaac

SEQ ID NO: 42009 - RNA, 20 nt, Artificial Sequence
  spacer sequence TTCN PAM
gcagaaguuuuagcgccucu

SEQ ID NO: 42010 - RNA, 20 nt, Artificial Sequence
  spacer sequence TTCN PAM
aucccggguuucggcagaag

SEQ ID NO: 42011 - RNA, 20 nt, Artificial Sequence
  spacer sequence TTCN PAM
gucuaacgcucucccaacug

SEQ ID NO: 42012 - RNA, 20 nt, Artificial Sequence
  spacer sequence TTCN PAM
gcugggcggcagagucgcuc

SEQ ID NO: 42013 - RNA, 20 nt, Artificial Sequence
  spacer sequence TTCN PAM
cugcgcaggcgcagucguuu

SEQ ID NO: 42014 - RNA, 20 nt, Artificial Sequence
  spacer sequence TTCN PAM
cgucagcaggccccacaucc

SEQ ID NO: 42015 - RNA, 20 nt, Artificial Sequence
  spacer sequence TTCN PAM
gcuguuaaccgaaagguugg

SEQ ID NO: 42016 - RNA, 20 nt, Artificial Sequence
  spacer sequence TTCN PAM
guuaacagccgaacgcgcua

SEQ ID NO: 42017 - RNA, 20 nt, Artificial Sequence
  spacer sequence TTCN PAM
agcccacccagggacgcgug

SEQ ID NO: 42018 - RNA, 20 nt, Artificial Sequence
  spacer sequence TTCN PAM
aggagggcaaaagucaccac

SEQ ID NO: 42019 - RNA, 20 nt, Artificial Sequence
  spacer sequence TTCN PAM
uguuauuccaggagggcaaa

SEQ ID NO: 42020 - RNA, 20 nt, Artificial Sequence
  spacer sequence TTCN PAM
gccucgggugaucugggggu

SEQ ID NO: 42021 - RNA, 20 nt, Artificial Sequence
  spacer sequence TTCN PAM
gccuccguggucguguugcg

SEQ ID NO: 42022 - RNA, 20 nt, Artificial Sequence
  spacer sequence TTCN PAM
gcugcgcuuucggccuccgu

SEQ ID NO: 42023 - RNA, 20 nt, Artificial Sequence
  spacer sequence TTCN PAM
gguuuccgcaugcgcuccga

SEQ ID NO: 42024 - RNA, 20 nt, Artificial Sequence
  spacer sequence TTCN PAM
gcaugcgcuccgagccgcuu

SEQ ID NO: 42025 - RNA, 20 nt, Artificial Sequence
  spacer sequence TTCN PAM
cggggccgccgcccaaagcg

SEQ ID NO: 42026 - RNA, 20 nt, Artificial Sequence
  spacer sequence TTCN PAM
ccuuagcgcuccggguuccc

SEQ ID NO: 42027 - RNA, 20 nt, Artificial Sequence
  spacer sequence TTCN PAM
gacaaccucugagguccguu

SEQ ID NO: 42028 - RNA, 20 nt, Artificial Sequence
  spacer sequence TTCN PAM
ccgagccggccgcuccucgg

SEQ ID NO: 42029 - RNA, 20 nt, Artificial Sequence
  spacer sequence TTCN PAM
ucgcaagccgggcggggagc

SEQ ID NO: 42030 - RNA, 20 nt, Artificial Sequence
  spacer sequence TTCN PAM
ccgacuguacucuggacgca

SEQ ID NO: 42031 - RNA, 20 nt, Artificial Sequence
  spacer sequence TTCN PAM
ugaggcuggaggcuugcguc

SEQ ID NO: 42032 - RNA, 20 nt, Artificial Sequence
  spacer sequence TTCN PAM
cguccccgagaccagggcac

SEQ ID NO: 42033 - RNA, 20 nt, Artificial Sequence
  spacer sequence TTCN PAM
cagccugucaggcaggcccc

SEQ ID NO: 42034 - RNA, 20 nt, Artificial Sequence
  spacer sequence TTCN PAM
aggucacagggccgggccug

SEQ ID NO: 42035 - RNA, 20 nt, Artificial Sequence
  spacer sequence TTCN PAM
caggcccggcccugugaccu

SEQ ID NO: 42036 - RNA, 20 nt, Artificial Sequence
  spacer sequence TTCN PAM
uucccaggcccggcccugug

SEQ ID NO: 42037 - RNA, 20 nt, Artificial Sequence
  spacer sequence TTCN PAM
gcugaucccaaaaaaguccc

SEQ ID NO: 42038 - RNA, 20 nt, Artificial Sequence
  spacer sequence TTCN PAM
augcauuuaauaacuuuauc

SEQ ID NO: 42039 - RNA, 20 nt, Artificial Sequence
  spacer sequence TTCN PAM
auggauuuuauuccaugcau

SEQ ID NO: 42040 - RNA, 20 nt, Artificial Sequence
  spacer sequence TTCN PAM
uugcaauucuauggauuuua

SEQ ID NO: 42041 - RNA, 20 nt, Artificial Sequence
  spacer sequence TTCN PAM
agacaaucuuuuaauaacug

SEQ ID NO: 42042 - RNA, 20 nt, Artificial Sequence
  spacer sequence TTCN PAM
cuuaugaacgcgaucuagcg

SEQ ID NO: 42043 - RNA, 20 nt, Artificial Sequence
  spacer sequence TTCN PAM
uaagggaagcacuuagauua

SEQ ID NO: 42044 - RNA, 20 nt, Artificial Sequence
  spacer sequence TTCN PAM
aaaucacagucgcaauuaga

SEQ ID NO: 42045 - RNA, 20 nt, Artificial Sequence
  spacer sequence TTCN PAM
acuccucacuccuuccaaau

SEQ ID NO: 42046 - RNA, 20 nt, Artificial Sequence
  spacer sequence TTCN PAM
guaucaucaaagccucauuu

SEQ ID NO: 42047 - RNA, 20 nt, Artificial Sequence
  spacer sequence TTCN PAM
uagcuauggugcaggggcug

SEQ ID NO: 42048 - RNA, 20 nt, Artificial Sequence
  spacer sequence TTCN PAM
gcuuggugaaaaguuacagg

SEQ ID NO: 42049 - RNA, 20 nt, Artificial Sequence
  spacer sequence TTCN PAM
ccaagcggaaucacagaugu

SEQ ID NO: 42050 - RNA, 20 nt, Artificial Sequence
  spacer sequence TTCN PAM
uagcauagacaacaaaauac

SEQ ID NO: 42051 - RNA, 20 nt, Artificial Sequence
  spacer sequence TTCN PAM
ggcacuucaguguccugugu

SEQ ID NO: 42052 - RNA, 20 nt, Artificial Sequence
  spacer sequence TTCN PAM
guguccuguguagcugggac

SEQ ID NO: 42053 - RNA, 20 nt, Artificial Sequence
  spacer sequence TTCN PAM
agaccagccugggcaacagg

SEQ ID NO: 42054 - RNA, 20 nt, Artificial Sequence
  spacer sequence TTCN PAM
gaguucaagcaauccuccca

SEQ ID NO: 42055 - RNA, 20 nt, Artificial Sequence
  spacer sequence TTCN PAM
agcaauccucccaccugagc

SEQ ID NO: 42056 - RNA, 20 nt, Artificial Sequence
  spacer sequence TTCN PAM
uagcguaggcugggugccgu

SEQ ID NO: 42057 - RNA, 20 nt, Artificial Sequence
  spacer sequence TTCN PAM
auucuuagcguaggcugggu

SEQ ID NO: 42058 - RNA, 20 nt, Artificial Sequence
  spacer sequence TTCN PAM
uucaauucuuagcguaggcu

SEQ ID NO: 42059 - RNA, 20 nt, Artificial Sequence
  spacer sequence TTCN PAM
auaagaugcuggugacaaca

SEQ ID NO: 42060 - RNA, 20 nt, Artificial Sequence
  spacer sequence TTCN PAM
aagcaaauucacaguucuga

SEQ ID NO: 42061 - RNA, 20 nt, Artificial Sequence
  spacer sequence TTCN PAM
caguucugaauccucaccag

SEQ ID NO: 42062 - RNA, 20 nt, Artificial Sequence
  spacer sequence TTCN PAM
gaauccucaccaggccccuu

SEQ ID NO: 42063 - RNA, 20 nt, Artificial Sequence
  spacer sequence TTCN PAM
gaacugugaauuugcuugga

SEQ ID NO: 42064 - RNA, 20 nt, Artificial Sequence
  spacer sequence TTCN PAM
uaacaaggggccuggugagg

SEQ ID NO: 42065 - RNA, 20 nt, Artificial Sequence
  spacer sequence TTCN PAM
aaagugcugggauuacaggc

SEQ ID NO: 42066 - RNA, 20 nt, Artificial Sequence
  spacer sequence TTCN PAM
agaccagccuggccaacaug

SEQ ID NO: 42067 - RNA, 20 nt, Artificial Sequence
  spacer sequence TTCN PAM
ccauguuggccaggcugguc

SEQ ID NO: 42068 - RNA, 20 nt, Artificial Sequence
  spacer sequence TTCN PAM
cuugccccagccccccagua

SEQ ID NO: 42069 - RNA, 20 nt, Artificial Sequence
  spacer sequence TTCN PAM
cccugcgucuuuccucugua

SEQ ID NO: 42070 - RNA, 20 nt, Artificial Sequence
  spacer sequence TTCN PAM
ucuguacauguuuguguccu

SEQ ID NO: 42071 - RNA, 20 nt, Artificial Sequence
  spacer sequence TTCN PAM
uacaaggacauaagucauau

SEQ ID NO: 42072 - RNA, 20 nt, Artificial Sequence
  spacer sequence TTCN PAM
agugauucuccugccucagc

SEQ ID NO: 42073 - RNA, 20 nt, Artificial Sequence
  spacer sequence TTCN PAM
ccugccucagccucucgagu

SEQ ID NO: 42074 - RNA, 20 nt, Artificial Sequence
  spacer sequence TTCN PAM
ccauguugcccaggcugguc

SEQ ID NO: 42075 - RNA, 20 nt, Artificial Sequence
  spacer sequence TTCN PAM
agaccagccugggcaacaug

SEQ ID NO: 42076 - RNA, 20 nt, Artificial Sequence
  spacer sequence TTCN PAM
ggaggccgaggcagguggau

SEQ ID NO: 42077 - RNA, 20 nt, Artificial Sequence
  spacer sequence TTCN PAM
agcacuucaggaggccgagg

SEQ ID NO: 42078 - RNA, 20 nt, Artificial Sequence
  spacer sequence TTCN PAM
gagguccugggguuagggcu

SEQ ID NO: 42079 - RNA, 20 nt, Artificial Sequence
  spacer sequence TTCN PAM
gaugcaggucggguggaggg

SEQ ID NO: 42080 - RNA, 20 nt, Artificial Sequence
  spacer sequence TTCN PAM
gccgucaccagcaccaagcc

SEQ ID NO: 42081 - RNA, 20 nt, Artificial Sequence
  spacer sequence TTCN PAM
ggauucuuccuugugagcca

SEQ ID NO: 42082 - RNA, 20 nt, Artificial Sequence
  spacer sequence TTCN PAM
uccuugugagccaggauucc

SEQ ID NO: 42083 - RNA, 20 nt, Artificial Sequence
  spacer sequence TTCN PAM
uugugagccaggauuccugg

SEQ ID NO: 42084 - RNA, 20 nt, Artificial Sequence
  spacer sequence TTCN PAM
uggcaccuccagguuuccuc

SEQ ID NO: 42085 - RNA, 20 nt, Artificial Sequence
  spacer sequence TTCN PAM
ucccgcugagugccccgggc

SEQ ID NO: 42086 - RNA, 20 nt, Artificial Sequence
  spacer sequence TTCN PAM
ccucgggaaggcucucccag

SEQ ID NO: 42087 - RNA, 20 nt, Artificial Sequence
  spacer sequence TTCN PAM
cgaggcgaagacuaaggcca

SEQ ID NO: 42088 - RNA, 20 nt, Artificial Sequence
  spacer sequence TTCN PAM
ugcaggcgcguucccuccuc

SEQ ID NO: 42089 - RNA, 20 nt, Artificial Sequence
  spacer sequence TTCN PAM
cuccucugcgcuuccuuuga

SEQ ID NO: 42090 - RNA, 20 nt, Artificial Sequence
  spacer sequence TTCN PAM
uuugaggcuggcuccucuag

SEQ ID NO: 42091 - RNA, 20 nt, Artificial Sequence
  spacer sequence TTCN PAM
guguagauugacgugggcag

SEQ ID NO: 42092 - RNA, 20 nt, Artificial Sequence
  spacer sequence TTCN PAM
ugcaggauggggccugugcu

SEQ ID NO: 42093 - RNA, 20 nt, Artificial Sequence
  spacer sequence TTCN PAM
cacgcagcugagcacaggcc

SEQ ID NO: 42094 - RNA, 20 nt, Artificial Sequence
  spacer sequence TTCN PAM
aucuccaucuaugcgugcuu

SEQ ID NO: 42095 - RNA, 20 nt, Artificial Sequence
  spacer sequence TTCN PAM
gauacccggggcgucccgcc

SEQ ID NO: 42096 - RNA, 20 nt, Artificial Sequence
  spacer sequence TTCN PAM
guucagauacccggggcguc

SEQ ID NO: 42097 - RNA, 20 nt, Artificial Sequence
  spacer sequence TTCN PAM
caugaggcagguuucaguuc

SEQ ID NO: 42098 - RNA, 20 nt, Artificial Sequence
  spacer sequence TTCN PAM
ugcgccagggcccccgcacu

SEQ ID NO: 42099 - RNA, 20 nt, Artificial Sequence
  spacer sequence TTCN PAM
cuggcaccugccgcuuuccu

SEQ ID NO: 42100 - RNA, 20 nt, Artificial Sequence
  spacer sequence TTCN PAM
uuccggggccaugcagucuc

SEQ ID NO: 42101 - RNA, 20 nt, Artificial Sequence
  spacer sequence TTCN PAM
ggggccaugcagucucaagc

SEQ ID NO: 42102 - RNA, 20 nt, Artificial Sequence
  spacer sequence TTCN PAM
gaaaacccccucguuaccua

SEQ ID NO: 42103 - RNA, 20 nt, Artificial Sequence
  spacer sequence TTCN PAM
gaacacgagagagucuuagu

SEQ ID NO: 42104 - RNA, 20 nt, Artificial Sequence
  spacer sequence TTCN PAM
ccaucaggcuccugcccgca

SEQ ID NO: 42105 - RNA, 20 nt, Artificial Sequence
  spacer sequence TTCN PAM
caccccgugguccucucugc

SEQ ID NO: 42106 - RNA, 20 nt, Artificial Sequence
  spacer sequence TTCN PAM
ccugcagugcagaccaaugg

SEQ ID NO: 42107 - RNA, 20 nt, Artificial Sequence
  spacer sequence TTCN PAM
cccucccuuggagcagccug

SEQ ID NO: 42108 - RNA, 20 nt, Artificial Sequence
  spacer sequence TTCN PAM
caggcccugcaguggccuug

SEQ ID NO: 42109 - RNA, 20 nt, Artificial Sequence
  spacer sequence TTCN PAM
caccuguuuccacuccugcu

SEQ ID NO: 42110 - RNA, 20 nt, Artificial Sequence
  spacer sequence TTCN PAM
acuccugcuguccccguugg

SEQ ID NO: 42111 - RNA, 20 nt, Artificial Sequence
  spacer sequence TTCN PAM
uccucuugcucaagcccuuu

SEQ ID NO: 42112 - RNA, 20 nt, Artificial Sequence
  spacer sequence TTCN PAM
gaaccugcguggcagccggg

SEQ ID NO: 42113 - RNA, 20 nt, Artificial Sequence
  spacer sequence TTCN PAM
gaacaaagggcuugagcaag

SEQ ID NO: 42114 - RNA, 20 nt, Artificial Sequence
  spacer sequence TTCN PAM
gagccccaagccagagcucu

SEQ ID NO: 42115 - RNA, 20 nt, Artificial Sequence
  spacer sequence TTCN PAM
ugcagggaccuccccugcgc

SEQ ID NO: 42116 - RNA, 20 nt, Artificial Sequence
  spacer sequence TTCN PAM
gaggccggcccgggaaaccc

SEQ ID NO: 42117 - RNA, 20 nt, Artificial Sequence
  spacer sequence TTCN PAM
cgggccggccucugaaggug

SEQ ID NO: 42118 - RNA, 20 nt, Artificial Sequence
  spacer sequence TTCN PAM
aaagccgagccggcugcgcu

SEQ ID NO: 42119 - RNA, 20 nt, Artificial Sequence
  spacer sequence TTCN PAM
cgcagccggagcccgcguga

SEQ ID NO: 42120 - RNA, 20 nt, Artificial Sequence
  spacer sequence TTCN PAM
ucugcagcugcaggaugccg

SEQ ID NO: 42121 - RNA, 20 nt, Artificial Sequence
  spacer sequence TTCN PAM
cccacacaccacacugggag

SEQ ID NO: 42122 - RNA, 20 nt, Artificial Sequence
  spacer sequence TTCN PAM
cgcugcucugcgaagacccu

SEQ ID NO: 42123 - RNA, 20 nt, Artificial Sequence
  spacer sequence TTCN PAM
cagagcagcgggaaaggacc

SEQ ID NO: 42124 - RNA, 20 nt, Artificial Sequence
  spacer sequence TTCN PAM
acgcucgggacuuugggcca

SEQ ID NO: 42125 - RNA, 20 nt, Artificial Sequence
  spacer sequence TTCN PAM
ugggagggcccugacucagu

SEQ ID NO: 42126 - RNA, 20 nt, Artificial Sequence
  spacer sequence TTCN PAM
gaguguggccuguggccugc

SEQ ID NO: 42127 - RNA, 20 nt, Artificial Sequence
  spacer sequence TTCN PAM
aggcgguggcaugggcuggu

SEQ ID NO: 42128 - RNA, 20 nt, Artificial Sequence
  spacer sequence TTCN PAM
gggaacccugacuccacccc

SEQ ID NO: 42129 - RNA, 20 nt, Artificial Sequence
  spacer sequence TTCN PAM
ccgaaagcccuggguggaga

SEQ ID NO: 42130 - RNA, 20 nt, Artificial Sequence
  spacer sequence TTCN PAM
uccgucgaaguccaggccuc

SEQ ID NO: 42131 - RNA, 20 nt, Artificial Sequence
  spacer sequence TTCN PAM
acggaugaaggggcuggugg

SEQ ID NO: 42132 - RNA, 20 nt, Artificial Sequence
  spacer sequence TTCN PAM
uucagcaaacgucccaucuu

SEQ ID NO: 42133 - RNA, 20 nt, Artificial Sequence
  spacer sequence TTCN PAM
gcaaacgucccaucuuccug

SEQ ID NO: 42134 - RNA, 20 nt, Artificial Sequence
  spacer sequence TTCN PAM
uguguucagcgccagaugcc

SEQ ID NO: 42135 - RNA, 20 nt, Artificial Sequence
  spacer sequence TTCN PAM
gcgccagaugccgccggugc

SEQ ID NO: 42136 - RNA, 20 nt, Artificial Sequence
  spacer sequence TTCN PAM
ggggaucggcaguuaugacg

SEQ ID NO: 42137 - RNA, 20 nt, Artificial Sequence
  spacer sequence TTCN PAM
ccacccccgccccagucucc

SEQ ID NO: 42138 - RNA, 20 nt, Artificial Sequence
  spacer sequence TTCN PAM
aggcugcuugacccggcugg

SEQ ID NO: 42139 - RNA, 20 nt, Artificial Sequence
  spacer sequence TTCN PAM
gcuggcugacgcccuguccc

SEQ ID NO: 42140 - RNA, 20 nt, Artificial Sequence
  spacer sequence TTCN PAM
cucagggcaaggaggucagu

SEQ ID NO: 42141 - RNA, 20 nt, Artificial Sequence
  spacer sequence TTCN PAM
uggggccguccugcucgccc

SEQ ID NO: 42142 - RNA, 20 nt, Artificial Sequence
  spacer sequence TTCN PAM
uggggcugggcagguggggc

SEQ ID NO: 42143 - RNA, 20 nt, Artificial Sequence
  spacer sequence TTCN PAM
ucucaggaggcaucgccccu

SEQ ID NO: 42144 - RNA, 20 nt, Artificial Sequence
  spacer sequence TTCN PAM
agaugugguuuccucucagg

SEQ ID NO: 42145 - RNA, 20 nt, Artificial Sequence
  spacer sequence TTCN PAM
ccaagccucccauuuccaga

SEQ ID NO: 42146 - RNA, 20 nt, Artificial Sequence
  spacer sequence TTCN PAM
cugcccgccccagcacaccc

SEQ ID NO: 42147 - RNA, 20 nt, Artificial Sequence
  spacer sequence TTCN PAM
ugccuggggugggcaaagau

SEQ ID NO: 42148 - RNA, 20 nt, Artificial Sequence
  spacer sequence TTCN PAM
cugaccccacugcaaagggu

SEQ ID NO: 42149 - RNA, 20 nt, Artificial Sequence
  spacer sequence TTCN PAM
ucugaggaagggacaucggg

SEQ ID NO: 42150 - RNA, 20 nt, Artificial Sequence
  spacer sequence TTCN PAM
ucagaugaaagccaccugac

SEQ ID NO: 42151 - RNA, 20 nt, Artificial Sequence
  spacer sequence TTCN PAM
gagcggccccaggauccgcc

SEQ ID NO: 42152 - RNA, 20 nt, Artificial Sequence
  spacer sequence TTCN PAM
uguguccaugggaugggcgg

SEQ ID NO: 42153 - RNA, 20 nt, Artificial Sequence
  spacer sequence TTCN PAM
agcggcugcucccucaccuc

SEQ ID NO: 42154 - RNA, 20 nt, Artificial Sequence
  spacer sequence TTCN PAM
ccucagggacccugcagugg

SEQ ID NO: 42155 - RNA, 20 nt, Artificial Sequence
  spacer sequence TTCN PAM
cugugagggucacugcugcc

SEQ ID NO: 42156 - RNA, 20 nt, Artificial Sequence
  spacer sequence TTCN PAM
cagcuucucugugaggguca

SEQ ID NO: 42157 - RNA, 20 nt, Artificial Sequence
  spacer sequence TTCN PAM
cugugaggggucccaccagc

SEQ ID NO: 42158 - RNA, 20 nt, Artificial Sequence
  spacer sequence TTCN PAM
cggcuucucugugagggguc

SEQ ID NO: 42159 - RNA, 20 nt, Artificial Sequence
  spacer sequence TTCN PAM
ggugacacacagcugggauc

SEQ ID NO: 42160 - RNA, 20 nt, Artificial Sequence
  spacer sequence TTCN PAM
uggccgggaguccagggugu

SEQ ID NO: 42161 - RNA, 20 nt, Artificial Sequence
  spacer sequence TTCN PAM
cacagaugaucacgccccug

SEQ ID NO: 42162 - RNA, 20 nt, Artificial Sequence
  spacer sequence TTCN PAM
aggggaugaccuugcagagg

SEQ ID NO: 42163 - RNA, 20 nt, Artificial Sequence
  spacer sequence TTCN PAM
ccucugcaaggucauccccu

SEQ ID NO: 42164 - RNA, 20 nt, Artificial Sequence
  spacer sequence TTCN PAM
uuuccccucugcaaggucau

SEQ ID NO: 42165 - RNA, 20 nt, Artificial Sequence
  spacer sequence TTCN PAM
gcagguggggagauccuggg

SEQ ID NO: 42166 - RNA, 20 nt, Artificial Sequence
  spacer sequence TTCN PAM
cucucgggagucccccuggc

SEQ ID NO: 42167 - RNA, 20 nt, Artificial Sequence
  spacer sequence TTCN PAM
uggggguugggggccugggg

SEQ ID NO: 42168 - RNA, 20 nt, Artificial Sequence
  spacer sequence TTCN PAM
agcggcuccgggacugggcc

SEQ ID NO: 42169 - RNA, 20 nt, Artificial Sequence
  spacer sequence TTCN PAM
agacagccuccccagcccug

SEQ ID NO: 42170 - RNA, 20 nt, Artificial Sequence
  spacer sequence TTCN PAM
uggaggagggggcacagggu

SEQ ID NO: 42171 - RNA, 20 nt, Artificial Sequence
  spacer sequence TTCN PAM
gcccugcacccccuccucca

SEQ ID NO: 42172 - RNA, 20 nt, Artificial Sequence
  spacer sequence TTCN PAM
gcccgccucuguccaugcug

SEQ ID NO: 42173 - RNA, 20 nt, Artificial Sequence
  spacer sequence TTCN PAM
cgcucaggacuacuguguuc

SEQ ID NO: 42174 - RNA, 20 nt, Artificial Sequence
  spacer sequence TTCN PAM
gccucccuggcuggucaucc

SEQ ID NO: 42175 - RNA, 20 nt, Artificial Sequence
  spacer sequence TTCN PAM
cucccccucccucuauccga

SEQ ID NO: 42176 - RNA, 20 nt, Artificial Sequence
  spacer sequence TTCN PAM
gauagagggagggggagaga

SEQ ID NO: 42177 - RNA, 20 nt, Artificial Sequence
  spacer sequence TTCN PAM
ccucccagauagucucaagu

SEQ ID NO: 42178 - RNA, 20 nt, Artificial Sequence
  spacer sequence TTCN PAM
gggugggaacacugaggccc

SEQ ID NO: 42179 - RNA, 20 nt, Artificial Sequence
  spacer sequence TTCN PAM
cacccugaaaaugggcacgu

SEQ ID NO: 42180 - RNA, 20 nt, Artificial Sequence
  spacer sequence TTCN PAM
uagcagcccuuagcgucuga

SEQ ID NO: 42181 - RNA, 20 nt, Artificial Sequence
  spacer sequence TTCN PAM
gagugcuauucuuagccggg

SEQ ID NO: 42182 - RNA, 20 nt, Artificial Sequence
  spacer sequence TTCN PAM
uagccgggcgagucggggcu

SEQ ID NO: 42183 - RNA, 20 nt, Artificial Sequence
  spacer sequence TTCN PAM
gccugccugggagagcagcc

SEQ ID NO: 42184 - RNA, 20 nt, Artificial Sequence
  spacer sequence TTCN PAM
ucccgaccucagacagggag

SEQ ID NO: 42185 - RNA, 20 nt, Artificial Sequence
  spacer sequence TTCN PAM
acccaguuucacccaggucu

SEQ ID NO: 42186 - RNA, 20 nt, Artificial Sequence
  spacer sequence TTCN PAM
cccaggucucacguuugagg

SEQ ID NO: 42187 - RNA, 20 nt, Artificial Sequence
  spacer sequence TTCN PAM
ucuccagggggagugaggcc

SEQ ID NO: 42188 - RNA, 20 nt, Artificial Sequence
  spacer sequence TTCN PAM
gguacuuaggcggugccuaa

SEQ ID NO: 42189 - RNA, 20 nt, Artificial Sequence
  spacer sequence TTCN PAM
cggggagugcggcaggcgug

SEQ ID NO: 42190 - RNA, 20 nt, Artificial Sequence
  spacer sequence TTCN PAM
caggcgaggagacagaggcg

SEQ ID NO: 42191 - RNA, 20 nt, Artificial Sequence
  spacer sequence TTCN PAM
ccugcgcccccgggggcggu

SEQ ID NO: 42192 - RNA, 20 nt, Artificial Sequence
  spacer sequence TTCN PAM
cgccgggcgcgaagaugggg

SEQ ID NO: 42193 - RNA, 20 nt, Artificial Sequence
  spacer sequence TTCN PAM
cgcccggcgagaacugcagc

SEQ ID NO: 42194 - RNA, 20 nt, Artificial Sequence
  spacer sequence TTCN PAM
cguccccgggcgcggggcug

SEQ ID NO: 42195 - RNA, 20 nt, Artificial Sequence
  spacer sequence TTCN PAM
aguccccagccugcagguuc

SEQ ID NO: 42196 - RNA, 20 nt, Artificial Sequence
  spacer sequence TTCN PAM
ucaucugucagcaccgcaga

SEQ ID NO: 42197 - RNA, 20 nt, Artificial Sequence
  spacer sequence TTCN PAM
gcggugcugacagaugagga

SEQ ID NO: 42198 - RNA, 20 nt, Artificial Sequence
  spacer sequence TTCN PAM
cacaccccagcgaggagggg

SEQ ID NO: 42199 - RNA, 20 nt, Artificial Sequence
  spacer sequence TTCN PAM
aggcgcuguuggaagugcuu

SEQ ID NO: 42200 - RNA, 20 nt, Artificial Sequence
  spacer sequence TTCN PAM
aacagcgccuggaagauccu

SEQ ID NO: 42201 - RNA, 20 nt, Artificial Sequence
  spacer sequence TTCN PAM
gaagaugcuacagugaguuc

SEQ ID NO: 42202 - RNA, 20 nt, Artificial Sequence
  spacer sequence TTCN PAM
gaagauuaaaugauuuuaaa

SEQ ID NO: 42203 - RNA, 20 nt, Artificial Sequence
  spacer sequence TTCN PAM
gucuuuuuuuaauagagacg

SEQ ID NO: 42204 - RNA, 20 nt, Artificial Sequence
  spacer sequence TTCN PAM
gccucccaaaguguugggau

SEQ ID NO: 42205 - RNA, 20 nt, Artificial Sequence
  spacer sequence TTCN PAM
augaugacugucguuuuucc

SEQ ID NO: 42206 - RNA, 20 nt, Artificial Sequence
  spacer sequence TTCN PAM
uuccuuccuuccuuccuuuc

SEQ ID NO: 42207 - RNA, 20 nt, Artificial Sequence
  spacer sequence TTCN PAM
uuccuuccuuccuuucuuuu

SEQ ID NO: 42208 - RNA, 20 nt, Artificial Sequence
  spacer sequence TTCN PAM
uuccuuccuuucuuuuuuga

SEQ ID NO: 42209 - RNA, 20 nt, Artificial Sequence
  spacer sequence TTCN PAM
uuccuuucuuuuuugaaagc

SEQ ID NO: 42210 - RNA, 20 nt, Artificial Sequence
  spacer sequence TTCN PAM
uuucuuuuuugaaagcaagu

SEQ ID NO: 42211 - RNA, 20 nt, Artificial Sequence
  spacer sequence TTCN PAM
uuuuugaaagcaaguuuauu

SEQ ID NO: 42212 - RNA, 20 nt, Artificial Sequence
  spacer sequence TTCN PAM
aaaaagaaaggaaggaagga

SEQ ID NO: 42213 - RNA, 20 nt, Artificial Sequence
  spacer sequence TTCN PAM
uuaauaaacuugcuuucaaa

SEQ ID NO: 42214 - RNA, 20 nt, Artificial Sequence
  spacer sequence TTCN PAM
uuuuuauuccuuaauaaacu

SEQ ID NO: 42215 - RNA, 20 nt, Artificial Sequence
  spacer sequence TTCN PAM
acaucuguaaaaugacaguc

SEQ ID NO: 42216 - RNA, 20 nt, Artificial Sequence
  spacer sequence TTCN PAM
caaagccucaguuuccacau

SEQ ID NO: 42217 - RNA, 20 nt, Artificial Sequence
  spacer sequence TTCN PAM
ugagcccaugucacaccccc

SEQ ID NO: 42218 - RNA, 20 nt, Artificial Sequence
  spacer sequence TTCN PAM
gcccaaagacgccuccaguu

SEQ ID NO: 42219 - RNA, 20 nt, Artificial Sequence
  spacer sequence TTCN PAM
ggagaccaggacucaauccc

SEQ ID NO: 42220 - RNA, 20 nt, Artificial Sequence
  spacer sequence TTCN PAM
uccggcggcccugcagcugg

SEQ ID NO: 42221 - RNA, 20 nt, Artificial Sequence
  spacer sequence TTCN PAM
acccccgcacaccccagcug

SEQ ID NO: 42222 - RNA, 20 nt, Artificial Sequence
  spacer sequence TTCN PAM
ugggggcccccaagcccgcu

SEQ ID NO: 42223 - RNA, 20 nt, Artificial Sequence
  spacer sequence TTCN PAM
uucccccucugaacgugggg

SEQ ID NO: 42224 - RNA, 20 nt, Artificial Sequence
  spacer sequence TTCN PAM
cccucugaacguggggccac

SEQ ID NO: 42225 - RNA, 20 nt, Artificial Sequence
  spacer sequence TTCN PAM
gagggggaaggaaaccggcu

SEQ ID NO: 42226 - RNA, 20 nt, Artificial Sequence
  spacer sequence TTCN PAM
gcacggguuaacagaugcag

SEQ ID NO: 42227 - RNA, 20 nt, Artificial Sequence
  spacer sequence TTCN PAM
cucguguuaaaugggcauaa

SEQ ID NO: 42228 - RNA, 20 nt, Artificial Sequence
  spacer sequence TTCN PAM
cagguugcagcagggccacg

SEQ ID NO: 42229 - RNA, 20 nt, Artificial Sequence
  spacer sequence TTCN PAM
caccguggcccugcugcaac

SEQ ID NO: 42230 - RNA, 20 nt, Artificial Sequence
  spacer sequence TTCN PAM
gaggcugccugcguucacac

SEQ ID NO: 42231 - RNA, 20 nt, Artificial Sequence
  spacer sequence TTCN PAM
cugcgccaccuugucugggu

SEQ ID NO: 42232 - RNA, 20 nt, Artificial Sequence
  spacer sequence TTCN PAM
ccuugcccagacagccucuc

SEQ ID NO: 42233 - RNA, 20 nt, Artificial Sequence
  spacer sequence TTCN PAM
cguucugucucaagcugagc

SEQ ID NO: 42234 - RNA, 20 nt, Artificial Sequence
  spacer sequence TTCN PAM
gucucaagcugagcccacgu

SEQ ID NO: 42235 - RNA, 20 nt, Artificial Sequence
  spacer sequence TTCN PAM
gccccaggacaggcaugucc

SEQ ID NO: 42236 - RNA, 20 nt, Artificial Sequence
  spacer sequence TTCN PAM
gaccaggacaugccuguccu

SEQ ID NO: 42237 - RNA, 20 nt, Artificial Sequence
  spacer sequence TTCN PAM
gagacagagucucacucugu

SEQ ID NO: 42238 - RNA, 20 nt, Artificial Sequence
  spacer sequence TTCN PAM
agcgauucuccuaccucagc

SEQ ID NO: 42239 - RNA, 20 nt, Artificial Sequence
  spacer sequence TTCN PAM
ccuaccucagccuccugggu

SEQ ID NO: 42240 - RNA, 20 nt, Artificial Sequence
  spacer sequence TTCN PAM
acuaaaaauacaaaaaaaaa

SEQ ID NO: 42241 - RNA, 20 nt, Artificial Sequence
  spacer sequence TTCN PAM
ccauguuagccaggaugguc

SEQ ID NO: 42242 - RNA, 20 nt, Artificial Sequence
  spacer sequence TTCN PAM
cccgccucggccuccuaaag

SEQ ID NO: 42243 - RNA, 20 nt, Artificial Sequence
  spacer sequence TTCN PAM
ggccgggugggugcgguggc

SEQ ID NO: 42244 - RNA, 20 nt, Artificial Sequence
  spacer sequence TTCN PAM
cucucuuugguaguucacua

SEQ ID NO: 42245 - RNA, 20 nt, Artificial Sequence
  spacer sequence TTCN PAM
cuaacggaagguauuucuuc

SEQ ID NO: 42246 - RNA, 20 nt, Artificial Sequence
  spacer sequence TTCN PAM
guuagugaacuaccaaagag

SEQ ID NO: 42247 - RNA, 20 nt, Artificial Sequence
  spacer sequence TTCN PAM
ucaugguccuagcgucccuc

SEQ ID NO: 42248 - RNA, 20 nt, Artificial Sequence
  spacer sequence TTCN PAM
ugguccuagcgucccucuca

SEQ ID NO: 42249 - RNA, 20 nt, Artificial Sequence
  spacer sequence TTCN PAM
gugugccaggaucacugaca

SEQ ID NO: 42250 - RNA, 20 nt, Artificial Sequence
  spacer sequence TTCN PAM
ccauguuagccaggaugguc

SEQ ID NO: 42251 - RNA, 20 nt, Artificial Sequence
  spacer sequence TTCN PAM
aggagugagccaccaugcuc

SEQ ID NO: 42252 - RNA, 20 nt, Artificial Sequence
  spacer sequence TTCN PAM
aagagggagucuugcucugu

SEQ ID NO: 42253 - RNA, 20 nt, Artificial Sequence
  spacer sequence TTCN PAM
ugccuucaagcauuucuccg

SEQ ID NO: 42254 - RNA, 20 nt, Artificial Sequence
  spacer sequence TTCN PAM
agcauuucuccggccuuagc

SEQ ID NO: 42255 - RNA, 20 nt, Artificial Sequence
  spacer sequence TTCN PAM
ccggccuuagcuucccgagu

SEQ ID NO: 42256 - RNA, 20 nt, Artificial Sequence
  spacer sequence TTCN PAM
cgaguagcugggauuacagg

SEQ ID NO: 42257 - RNA, 20 nt, Artificial Sequence
  spacer sequence TTCN PAM
uuuguauuuuuaguagagac

SEQ ID NO: 42258 - RNA, 20 nt, Artificial Sequence
  spacer sequence TTCN PAM
cuauauauguuggcuaggcu

SEQ ID NO: 42259 - RNA, 20 nt, Artificial Sequence
  spacer sequence TTCN PAM
uuguauuuauuuaauucugu

SEQ ID NO: 42260 - RNA, 20 nt, Artificial Sequence
  spacer sequence TTCN PAM
gugaugaugaauaaaccaaa

SEQ ID NO: 42261 - RNA, 20 nt, Artificial Sequence
  spacer sequence TTCN PAM
ucaucacagaauuaaauaaa

SEQ ID NO: 42262 - RNA, 20 nt, Artificial Sequence
  spacer sequence TTCN PAM
ccuuaaucucacagcacauu

SEQ ID NO: 42263 - RNA, 20 nt, Artificial Sequence
  spacer sequence TTCN PAM
accuccuucugcugacauug

SEQ ID NO: 42264 - RNA, 20 nt, Artificial Sequence
  spacer sequence TTCN PAM
gcugacauuggaggacgggu

SEQ ID NO: 42265 - RNA, 20 nt, Artificial Sequence
  spacer sequence TTCN PAM
uuuuggggggucgucgugug

SEQ ID NO: 42266 - RNA, 20 nt, Artificial Sequence
  spacer sequence TTCN PAM
gacauugccaaguuaucccc

SEQ ID NO: 42267 - RNA, 20 nt, Artificial Sequence
  spacer sequence TTCN PAM
gggugacuuugcccccuagg

SEQ ID NO: 42268 - RNA, 20 nt, Artificial Sequence
  spacer sequence TTCN PAM
ucugggugacuuugcccccu

SEQ ID NO: 42269 - RNA, 20 nt, Artificial Sequence
  spacer sequence TTCN PAM
ucuucugggugacuuugccc

SEQ ID NO: 42270 - RNA, 20 nt, Artificial Sequence
  spacer sequence TTCN PAM
uagucauugaauuuaguuaa

SEQ ID NO: 42271 - RNA, 20 nt, Artificial Sequence
  spacer sequence TTCN PAM
augacuaugaaaagauauua

SEQ ID NO: 42272 - RNA, 20 nt, Artificial Sequence
  spacer sequence TTCN PAM
aguucagccccgaacugggu

SEQ ID NO: 42273 - RNA, 20 nt, Artificial Sequence
  spacer sequence TTCN PAM
gccccgaacugggugaccuu

SEQ ID NO: 42274 - RNA, 20 nt, Artificial Sequence
  spacer sequence TTCN PAM
gggcugaacuggaaucaaau

SEQ ID NO: 42275 - RNA, 20 nt, Artificial Sequence
  spacer sequence TTCN PAM
gugaaaugcggacaggggaa

SEQ ID NO: 42276 - RNA, 20 nt, Artificial Sequence
  spacer sequence TTCN PAM
cagaagaggaucccgagggu

SEQ ID NO: 42277 - RNA, 20 nt, Artificial Sequence
  spacer sequence TTCN PAM
ccuguccgcauuucacagaa

SEQ ID NO: 42278 - RNA, 20 nt, Artificial Sequence
  spacer sequence TTCN PAM
cgcuccguccgcccgccugg

SEQ ID NO: 42279 - RNA, 20 nt, Artificial Sequence
  spacer sequence TTCN PAM
gagugaagaguuaaagagga

SEQ ID NO: 42280 - RNA, 20 nt, Artificial Sequence
  spacer sequence TTCN PAM
cucggaagcgguggagccgc

SEQ ID NO: 42281 - RNA, 20 nt, Artificial Sequence
  spacer sequence TTCN PAM
ucuuuaacucuucacucgga

SEQ ID NO: 42282 - RNA, 20 nt, Artificial Sequence
  spacer sequence TTCN PAM
cagcgugccccgcggcaacg

SEQ ID NO: 42283 - RNA, 20 nt, Artificial Sequence
  spacer sequence TTCN PAM
ccucggaggcuccuggcguu

SEQ ID NO: 42284 - RNA, 20 nt, Artificial Sequence
  spacer sequence TTCN PAM
uuucuccucggaggcuccug

SEQ ID NO: 42285 - RNA, 20 nt, Artificial Sequence
  spacer sequence TTCN PAM
cgccgccgcagucggggccg

SEQ ID NO: 42286 - RNA, 20 nt, Artificial Sequence
  spacer sequence TTCN PAM
ggaggcgggagcgagcgagg

SEQ ID NO: 42287 - RNA, 20 nt, Artificial Sequence
  spacer sequence TTCN PAM
uggcggcggcggcggcgacg

SEQ ID NO: 42288 - RNA, 20 nt, Artificial Sequence
  spacer sequence TTCN PAM
cgccgggggcccuggacggg

SEQ ID NO: 42289 - RNA, 20 nt, Artificial Sequence
  spacer sequence TTCN PAM
cggcuucccguccuggggga

SEQ ID NO: 42290 - RNA, 20 nt, Artificial Sequence
  spacer sequence TTCN PAM
cguccugggggauccugaag

SEQ ID NO: 42291 - RNA, 20 nt, Artificial Sequence
  spacer sequence TTCN PAM
ggaucccccaggacgggaag

SEQ ID NO: 42292 - RNA, 20 nt, Artificial Sequence
  spacer sequence TTCN PAM
uggucgggggaaccccgaac

SEQ ID NO: 42293 - RNA, 20 nt, Artificial Sequence
  spacer sequence TTCN PAM
cccgaccaggaagucuggag

SEQ ID NO: 42294 - RNA, 20 nt, Artificial Sequence
  spacer sequence TTCN PAM
ggguucccccgaccaggaag

SEQ ID NO: 42295 - RNA, 20 nt, Artificial Sequence
  spacer sequence TTCN PAM
cgacugcgcguccugaggga

SEQ ID NO: 42296 - RNA, 20 nt, Artificial Sequence
  spacer sequence TTCN PAM
gggucccucaggacgcgcag

SEQ ID NO: 42297 - RNA, 20 nt, Artificial Sequence
  spacer sequence TTCN PAM
ggggcccccgccgccgcuuc

SEQ ID NO: 42298 - RNA, 20 nt, Artificial Sequence
  spacer sequence TTCN PAM
ugguuguggcggccccgaac

SEQ ID NO: 42299 - RNA, 20 nt, Artificial Sequence
  spacer sequence TTCN PAM
gggccgccacaaccaggaag

SEQ ID NO: 42300 - RNA, 20 nt, Artificial Sequence
  spacer sequence TTCN PAM
cguucggggccgccacaacc

SEQ ID NO: 42301 - RNA, 20 nt, Artificial Sequence
  spacer sequence TTCN PAM
uggccugggggaccccgaau

SEQ ID NO: 42302 - RNA, 20 nt, Artificial Sequence
  spacer sequence TTCN PAM
gggucccccaggccaggaag

SEQ ID NO: 42303 - RNA, 20 nt, Artificial Sequence
  spacer sequence TTCN PAM
cauucggggucccccaggcc

SEQ ID NO: 42304 - RNA, 20 nt, Artificial Sequence
  spacer sequence TTCN PAM
uggccagggggaccccaaac

SEQ ID NO: 42305 - RNA, 20 nt, Artificial Sequence
  spacer sequence TTCN PAM
gguucugccaccgcccaacc

SEQ ID NO: 42306 - RNA, 20 nt, Artificial Sequence
  spacer sequence TTCN PAM
gccaccgcccaaccuauccc

SEQ ID NO: 42307 - RNA, 20 nt, Artificial Sequence
  spacer sequence TTCN PAM
caaacccagggcccaggggg

SEQ ID NO: 42308 - RNA, 20 nt, Artificial Sequence
  spacer sequence TTCN PAM
gcagcucaagcccacccccg

SEQ ID NO: 42309 - RNA, 20 nt, Artificial Sequence
  spacer sequence TTCN PAM
gaggcggcgacgggcccgcg

SEQ ID NO: 42310 - RNA, 20 nt, Artificial Sequence
  spacer sequence TTCN PAM
cggccccgcgggguccggag

SEQ ID NO: 42311 - RNA, 20 nt, Artificial Sequence
  spacer sequence TTCN PAM
cugugccccagggcucggcg

SEQ ID NO: 42312 - RNA, 20 nt, Artificial Sequence
  spacer sequence TTCN PAM
uugguaggagcggcuccugc

SEQ ID NO: 42313 - RNA, 20 nt, Artificial Sequence
  spacer sequence TTCN PAM
uccggcaaaacagucugggu

SEQ ID NO: 42314 - RNA, 20 nt, Artificial Sequence
  spacer sequence TTCN PAM
ggcaaaacagucuggguugg

SEQ ID NO: 42315 - RNA, 20 nt, Artificial Sequence
  spacer sequence TTCN PAM
uaguggucugguguaaauuu

SEQ ID NO: 42316 - RNA, 20 nt, Artificial Sequence
  spacer sequence TTCN PAM
cggugcccuuagcuuugagc

SEQ ID NO: 42317 - RNA, 20 nt, Artificial Sequence
  spacer sequence TTCN PAM
cagcgcugggcuuggcuagu

SEQ ID NO: 42318 - RNA, 20 nt, Artificial Sequence
  spacer sequence TTCN PAM
cauccacaagugugaccugu

SEQ ID NO: 42319 - RNA, 20 nt, Artificial Sequence
  spacer sequence TTCN PAM
guuggagaaccaggaugaaa

SEQ ID NO: 42320 - RNA, 20 nt, Artificial Sequence
  spacer sequence TTCN PAM
ccaacggaaggugcucuuuu

SEQ ID NO: 42321 - RNA, 20 nt, Artificial Sequence
  spacer sequence TTCN PAM
uccugguucuccaacggaag

SEQ ID NO: 42322 - RNA, 20 nt, Artificial Sequence
  spacer sequence TTCN PAM
cugccucaccccaaagucga

SEQ ID NO: 42323 - RNA, 20 nt, Artificial Sequence
  spacer sequence TTCN PAM
agccgcgggugaacgugggc

SEQ ID NO: 42324 - RNA, 20 nt, Artificial Sequence
  spacer sequence TTCN PAM
cccgcggcuugaauggaccu

SEQ ID NO: 42325 - RNA, 20 nt, Artificial Sequence
  spacer sequence TTCN PAM
caaggguguccaugcaggga

SEQ ID NO: 42326 - RNA, 20 nt, Artificial Sequence
  spacer sequence TTCN PAM
ccuccacgcagcccguggcg

SEQ ID NO: 42327 - RNA, 20 nt, Artificial Sequence
  spacer sequence TTCN PAM
aagucagacuccuugggcaa

SEQ ID NO: 42328 - RNA, 20 nt, Artificial Sequence
  spacer sequence TTCN PAM
ugcccaaggagucugacuua

SEQ ID NO: 42329 - RNA, 20 nt, Artificial Sequence
  spacer sequence TTCN PAM
auucuaugcggaguccacgg

SEQ ID NO: 42330 - RNA, 20 nt, Artificial Sequence
  spacer sequence TTCN PAM
augcggaguccacggucugc

SEQ ID NO: 42331 - RNA, 20 nt, Artificial Sequence
  spacer sequence TTCN PAM
cgcacacaacaacuccacac

SEQ ID NO: 42332 - RNA, 20 nt, Artificial Sequence
  spacer sequence TTCN PAM
cagggucacaagcauuucac

SEQ ID NO: 42333 - RNA, 20 nt, Artificial Sequence
  spacer sequence TTCN PAM
auccaagcucagcacccucc

SEQ ID NO: 42334 - RNA, 20 nt, Artificial Sequence
  spacer sequence TTCN PAM
ugaugcagagcccucacugc

SEQ ID NO: 42335 - RNA, 20 nt, Artificial Sequence
  spacer sequence TTCN PAM
gggacacuuguggccgucca

SEQ ID NO: 42336 - RNA, 20 nt, Artificial Sequence
  spacer sequence TTCN PAM
cagggcagcagcuggacggc

SEQ ID NO: 42337 - RNA, 20 nt, Artificial Sequence
  spacer sequence TTCN PAM
agguguggauucccagggca

SEQ ID NO: 42338 - RNA, 20 nt, Artificial Sequence
  spacer sequence TTCN PAM
cccaaggauggcucccuaac

SEQ ID NO: 42339 - RNA, 20 nt, Artificial Sequence
  spacer sequence TTCN PAM
cagacucaaaagcagagcuu

SEQ ID NO: 42340 - RNA, 20 nt, Artificial Sequence
  spacer sequence TTCN PAM
aagccagcacagggacccuc

SEQ ID NO: 42341 - RNA, 20 nt, Artificial Sequence
  spacer sequence TTCN PAM
ucccccaucaagcuuuacau

SEQ ID NO: 42342 - RNA, 20 nt, Artificial Sequence
  spacer sequence TTCN PAM
agucagcuugaggggggcuu

SEQ ID NO: 42343 - RNA, 20 nt, Artificial Sequence
  spacer sequence TTCN PAM
ugcaggaggaagcgcauacg

SEQ ID NO: 42344 - RNA, 20 nt, Artificial Sequence
  spacer sequence TTCN PAM
uccugcaugaagccccccuc

SEQ ID NO: 42345 - RNA, 20 nt, Artificial Sequence
  spacer sequence TTCN PAM
caagaggaccaggacaggcc

SEQ ID NO: 42346 - RNA, 20 nt, Artificial Sequence
  spacer sequence TTCN PAM
ugaucgcgcgugcucugagc

SEQ ID NO: 42347 - RNA, 20 nt, Artificial Sequence
  spacer sequence TTCN PAM
caaggccagggagggcacac

SEQ ID NO: 42348 - RNA, 20 nt, Artificial Sequence
  spacer sequence TTCN PAM
gggaagcugacacagcgcgg

SEQ ID NO: 42349 - RNA, 20 nt, Artificial Sequence
  spacer sequence TTCN PAM
cagaauccaagucagaggcg

SEQ ID NO: 42350 - RNA, 20 nt, Artificial Sequence
  spacer sequence TTCN PAM
gcuggcuuccaaggcagcac

SEQ ID NO: 42351 - RNA, 20 nt, Artificial Sequence
  spacer sequence TTCN PAM
aaggcagcacacggucaugg

SEQ ID NO: 42352 - RNA, 20 nt, Artificial Sequence
  spacer sequence TTCN PAM
augaccgugugcugccuugg

SEQ ID NO: 42353 - RNA, 20 nt, Artificial Sequence
  spacer sequence TTCN PAM
auaaaccucucucuccaguu

SEQ ID NO: 42354 - RNA, 20 nt, Artificial Sequence
  spacer sequence TTCN PAM
ccaguguaccagauaaaauc

SEQ ID NO: 42355 - RNA, 20 nt, Artificial Sequence
  spacer sequence TTCN PAM
aggugucccugucuuaccau

SEQ ID NO: 42356 - RNA, 20 nt, Artificial Sequence
  spacer sequence TTCN PAM
uacaauauuuccaggugucc

SEQ ID NO: 42357 - RNA, 20 nt, Artificial Sequence
  spacer sequence TTCN PAM
ucccucugugacuuuccuac

SEQ ID NO: 42358 - RNA, 20 nt, Artificial Sequence
  spacer sequence TTCN PAM
ccucucuccgcugaguccuu

SEQ ID NO: 42359 - RNA, 20 nt, Artificial Sequence
  spacer sequence TTCN PAM
aggauacccaggacuguggc

SEQ ID NO: 42360 - RNA, 20 nt, Artificial Sequence
  spacer sequence TTCN PAM
acagccacccaauaaaccca

SEQ ID NO: 42361 - RNA, 20 nt, Artificial Sequence
  spacer sequence TTCN PAM
cuaucacuccccgcacugca

SEQ ID NO: 42362 - RNA, 20 nt, Artificial Sequence
  spacer sequence TTCN PAM
ggggcucucuuggugcauuu

SEQ ID NO: 42363 - RNA, 20 nt, Artificial Sequence
  spacer sequence TTCN PAM
gaggcaggucuccugggcuc

SEQ ID NO: 42364 - RNA, 20 nt, Artificial Sequence
  spacer sequence TTCN PAM
cuccgggucaggaguacccc

SEQ ID NO: 42365 - RNA, 20 nt, Artificial Sequence
  spacer sequence TTCN PAM
cagacaucacccaguguccu

SEQ ID NO: 42366 - RNA, 20 nt, Artificial Sequence
  spacer sequence TTCN PAM
ugugaaugggccuugagggu

SEQ ID NO: 42367 - RNA, 20 nt, Artificial Sequence
  spacer sequence TTCN PAM
caggaaucaaaggagccgac

SEQ ID NO: 42368 - RNA, 20 nt, Artificial Sequence
  spacer sequence TTCN PAM
agacaccggccugcuccaga

SEQ ID NO: 42369 - RNA, 20 nt, Artificial Sequence
  spacer sequence TTCN PAM
cacagcagcuccccaguggc

SEQ ID NO: 42370 - RNA, 20 nt, Artificial Sequence
  spacer sequence TTCN PAM
acccccuggggugaccccgg

SEQ ID NO: 42371 - RNA, 20 nt, Artificial Sequence
  spacer sequence TTCN PAM
uggugcgacccgucaaucug

SEQ ID NO: 42372 - RNA, 20 nt, Artificial Sequence
  spacer sequence TTCN PAM
gugaacugaggccuuuuccc

SEQ ID NO: 42373 - RNA, 20 nt, Artificial Sequence
  spacer sequence TTCN PAM
cagaagacagcacaaccuca

SEQ ID NO: 42374 - RNA, 20 nt, Artificial Sequence
  spacer sequence TTCN PAM
cauccaggccugguccccgu

SEQ ID NO: 42375 - RNA, 20 nt, Artificial Sequence
  spacer sequence TTCN PAM
gacaucaugacaugguguca

SEQ ID NO: 42376 - RNA, 20 nt, Artificial Sequence
  spacer sequence TTCN PAM
acagaugcuuauaggcugag

SEQ ID NO: 42377 - RNA, 20 nt, Artificial Sequence
  spacer sequence TTCN PAM
agcuuggcuccaggcguugc

SEQ ID NO: 42378 - RNA, 20 nt, Artificial Sequence
  spacer sequence TTCN PAM
ccuuggcaacgccuggagcc

SEQ ID NO: 42379 - RNA, 20 nt, Artificial Sequence
  spacer sequence TTCN PAM
ggggcuccuucagcacacag

SEQ ID NO: 42380 - RNA, 20 nt, Artificial Sequence
  spacer sequence TTCN PAM
gcacacagcagcgcguucca

SEQ ID NO: 42381 - RNA, 20 nt, Artificial Sequence
  spacer sequence TTCN PAM
aguucacggaccgcuccugu

SEQ ID NO: 42382 - RNA, 20 nt, Artificial Sequence
  spacer sequence TTCN PAM
cggaccgcuccuguguucug

SEQ ID NO: 42383 - RNA, 20 nt, Artificial Sequence
  spacer sequence TTCN PAM
guggaccccacacccugcag

SEQ ID NO: 42384 - RNA, 20 nt, Artificial Sequence
  spacer sequence TTCN PAM
cccacugccucaggccagug

SEQ ID NO: 42385 - RNA, 20 nt, Artificial Sequence
  spacer sequence TTCN PAM
caccuggucuuaggggcagg

SEQ ID NO: 42386 - RNA, 20 nt, Artificial Sequence
  spacer sequence TTCN PAM
ugccccuaagaccagguggg

SEQ ID NO: 42387 - RNA, 20 nt, Artificial Sequence
  spacer sequence TTCN PAM
ugaugcucuggaagaagaga

SEQ ID NO: 42388 - RNA, 20 nt, Artificial Sequence
  spacer sequence TTCN PAM
agagcaucaggaagagccuc

SEQ ID NO: 42389 - RNA, 20 nt, Artificial Sequence
  spacer sequence TTCN PAM
uccagagcaucaggaagagc

SEQ ID NO: 42390 - RNA, 20 nt, Artificial Sequence
  spacer sequence TTCN PAM
cuucuuccagagcaucagga

SEQ ID NO: 42391 - RNA, 20 nt, Artificial Sequence
  spacer sequence TTCN PAM
ccacacaucagccgccacug

SEQ ID NO: 42392 - RNA, 20 nt, Artificial Sequence
  spacer sequence TTCN PAM
gccucuugagauugugcacg

SEQ ID NO: 42393 - RNA, 20 nt, Artificial Sequence
  spacer sequence TTCN PAM
ugcugggccgggggaccaag

SEQ ID NO: 42394 - RNA, 20 nt, Artificial Sequence
  spacer sequence TTCN PAM
cuuccugcugggccggggga

SEQ ID NO: 42395 - RNA, 20 nt, Artificial Sequence
  spacer sequence TTCN PAM
gggccagcagccucaauggg

SEQ ID NO: 42396 - RNA, 20 nt, Artificial Sequence
  spacer sequence TTCN PAM
aaaaccggcggccagcccgg

SEQ ID NO: 42397 - RNA, 20 nt, Artificial Sequence
  spacer sequence TTCN PAM
ucuggccuaggcugaccaca

SEQ ID NO: 42398 - RNA, 20 nt, Artificial Sequence
  spacer sequence TTCN PAM
ggugccugugcgguauuuau

SEQ ID NO: 42399 - RNA, 20 nt, Artificial Sequence
  spacer sequence TTCN PAM
gccuguuaaagcaaaagccg

SEQ ID NO: 42400 - RNA, 20 nt, Artificial Sequence
  spacer sequence TTCN PAM
ucaugaccuuugaugggcag

SEQ ID NO: 42401 - RNA, 20 nt, Artificial Sequence
  spacer sequence TTCN PAM
cuugcaaccuggaguccagc

SEQ ID NO: 42402 - RNA, 20 nt, Artificial Sequence
  spacer sequence TTCN PAM
ucccuugcaaccuggagucc

SEQ ID NO: 42403 - RNA, 20 nt, Artificial Sequence
  spacer sequence TTCN PAM
cauuagugggggaggcgugg

SEQ ID NO: 42404 - RNA, 20 nt, Artificial Sequence
  spacer sequence TTCN PAM
agugucggagaugccgucag

SEQ ID NO: 42405 - RNA, 20 nt, Artificial Sequence
  spacer sequence TTCN PAM
ucugcguaggccaguguugc

SEQ ID NO: 42406 - RNA, 20 nt, Artificial Sequence
  spacer sequence TTCN PAM
uggacuccgacguuuacuug

SEQ ID NO: 42407 - RNA, 20 nt, Artificial Sequence
  spacer sequence TTCN PAM
gcugccugggcaguugaugg

SEQ ID NO: 42408 - RNA, 20 nt, Artificial Sequence
  spacer sequence TTCN PAM
gaugugccggcuucucacuc

SEQ ID NO: 42409 - RNA, 20 nt, Artificial Sequence
  spacer sequence TTCN PAM
cacucacgaccuggugaggu

SEQ ID NO: 42410 - RNA, 20 nt, Artificial Sequence
  spacer sequence TTCN PAM
uauuuuauugauuaaaacau

SEQ ID NO: 42411 - RNA, 20 nt, Artificial Sequence
  spacer sequence TTCN PAM
gaaguagggacuuugugcca

SEQ ID NO: 42412 - RNA, 20 nt, Artificial Sequence
  spacer sequence TTCN PAM
gaaucucaggauguuuuaau

SEQ ID NO: 42413 - RNA, 20 nt, Artificial Sequence
  spacer sequence TTCN PAM
guggcagggacugccuccag

SEQ ID NO: 42414 - RNA, 20 nt, Artificial Sequence
  spacer sequence TTCN PAM
gggacuucccggaggcuucu

SEQ ID NO: 42415 - RNA, 20 nt, Artificial Sequence
  spacer sequence TTCN PAM
cggaggcuucugucuguaga

SEQ ID NO: 42416 - RNA, 20 nt, Artificial Sequence
  spacer sequence TTCN PAM
gucuguagaccagggagaag

SEQ ID NO: 42417 - RNA, 20 nt, Artificial Sequence
  spacer sequence TTCN PAM
cccuggucuacagacagaag

SEQ ID NO: 42418 - RNA, 20 nt, Artificial Sequence
  spacer sequence TTCN PAM
ccgguggcuccugaguggua

SEQ ID NO: 42419 - RNA, 20 nt, Artificial Sequence
  spacer sequence TTCN PAM
uguguccaugugucuuuuac

SEQ ID NO: 42420 - RNA, 20 nt, Artificial Sequence
  spacer sequence TTCN PAM
aacgcuaaagcuuccugugu

SEQ ID NO: 42421 - RNA, 20 nt, Artificial Sequence
  spacer sequence TTCN PAM
guugagauauuugagagcag

SEQ ID NO: 42422 - RNA, 20 nt, Artificial Sequence
  spacer sequence TTCN PAM
cauagcugugucuggagcuc

SEQ ID NO: 42423 - RNA, 20 nt, Artificial Sequence
  spacer sequence TTCN PAM
uuucacauagcugugucugg

SEQ ID NO: 42424 - RNA, 20 nt, Artificial Sequence
  spacer sequence TTCN PAM
auaaggacugagacuuguuu

SEQ ID NO: 42425 - RNA, 20 nt, Artificial Sequence
  spacer sequence TTCN PAM
aaagaaacugaaauucuguc

SEQ ID NO: 42426 - RNA, 20 nt, Artificial Sequence
  spacer sequence TTCN PAM
uuugaaacaagucucagucc

SEQ ID NO: 42427 - RNA, 20 nt, Artificial Sequence
  spacer sequence TTCN PAM
guuucuuuugaaacaagucu

SEQ ID NO: 42428 - RNA, 20 nt, Artificial Sequence
  spacer sequence TTCN PAM
gucuuguucucaguaaugaa

SEQ ID NO: 42429 - RNA, 20 nt, Artificial Sequence
  spacer sequence TTCN PAM
caguaaugaaagucuuuuau

SEQ ID NO: 42430 - RNA, 20 nt, Artificial Sequence
  spacer sequence TTCN PAM
uuacugagaacaagacagaa

SEQ ID NO: 42431 - RNA, 20 nt, Artificial Sequence
  spacer sequence TTCN PAM
gacuuacaggaaaauuacaa

SEQ ID NO: 42432 - RNA, 20 nt, Artificial Sequence
  spacer sequence TTCN PAM
uguaagucagaaguuauaua

SEQ ID NO: 42433 - RNA, 20 nt, Artificial Sequence
  spacer sequence TTCN PAM
cauauccucuuggcccugcc

SEQ ID NO: 42434 - RNA, 20 nt, Artificial Sequence
  spacer sequence TTCN PAM
cuggggguggggcaagaggc

SEQ ID NO: 42435 - RNA, 20 nt, Artificial Sequence
  spacer sequence TTCN PAM
agcaguacaccucgagcuca

SEQ ID NO: 42436 - RNA, 20 nt, Artificial Sequence
  spacer sequence TTCN PAM
agaccagccuggccaacaug

SEQ ID NO: 42437 - RNA, 20 nt, Artificial Sequence
  spacer sequence TTCN PAM
acugaaauauuugagaguag

SEQ ID NO: 42438 - RNA, 20 nt, Artificial Sequence
  spacer sequence TTCN PAM
guagaaacacacacaguggg

SEQ ID NO: 42439 - RNA, 20 nt, Artificial Sequence
  spacer sequence TTCN PAM
caagaacaaugacauucucu

SEQ ID NO: 42440 - RNA, 20 nt, Artificial Sequence
  spacer sequence TTCN PAM
ugggaaacaauagauaucuc

SEQ ID NO: 42441 - RNA, 20 nt, Artificial Sequence
  spacer sequence TTCN PAM
cucacaugaacacagcacag

SEQ ID NO: 42442 - RNA, 20 nt, Artificial Sequence
  spacer sequence TTCN PAM
ugugagagaaugucauuguu

SEQ ID NO: 42443 - RNA, 20 nt, Artificial Sequence
  spacer sequence TTCN PAM
caauuuugaucacugugcug

SEQ ID NO: 42444 - RNA, 20 nt, Artificial Sequence
  spacer sequence TTCN PAM
ccauauuggccaggaugguc

SEQ ID NO: 42445 - RNA, 20 nt, Artificial Sequence
  spacer sequence TTCN PAM
ccugccucagccucccgagu

SEQ ID NO: 42446 - RNA, 20 nt, Artificial Sequence
  spacer sequence TTCN PAM
agcgauucuccugccucagc

SEQ ID NO: 42447 - RNA, 20 nt, Artificial Sequence
  spacer sequence TTCN PAM
aaaaaaaauugagaaaguau

SEQ ID NO: 42448 - RNA, 20 nt, Artificial Sequence
  spacer sequence TTCN PAM
caauuuuuuuuugaaaaauu

SEQ ID NO: 42449 - RNA, 20 nt, Artificial Sequence
  spacer sequence TTCN PAM
gccucagccucccaaguagc

SEQ ID NO: 42450 - RNA, 20 nt, Artificial Sequence
  spacer sequence TTCN PAM
agaccagccugggcaacgua

SEQ ID NO: 42451 - RNA, 20 nt, Artificial Sequence
  spacer sequence TTCN PAM
cagcugggcgcagaucacgc

SEQ ID NO: 42452 - RNA, 20 nt, Artificial Sequence
  spacer sequence TTCN PAM
gguuucucagcugagcguuu

SEQ ID NO: 42453 - RNA, 20 nt, Artificial Sequence
  spacer sequence TTCN PAM
cagcugagcguuucuagccc

SEQ ID NO: 42454 - RNA, 20 nt, Artificial Sequence
  spacer sequence TTCN PAM
agcccuucccccuuaauaca

SEQ ID NO: 42455 - RNA, 20 nt, Artificial Sequence
  spacer sequence TTCN PAM
cccuuaauacacaauuuuug

SEQ ID NO: 42456 - RNA, 20 nt, Artificial Sequence
  spacer sequence TTCN PAM
aaaauuguguauuaaggggg

SEQ ID NO: 42457 - RNA, 20 nt, Artificial Sequence
  spacer sequence TTCN PAM
uuuaaauuucaaaaauugug

SEQ ID NO: 42458 - RNA, 20 nt, Artificial Sequence
  spacer sequence TTCN PAM
gucuucauuuaaauuucaaa

SEQ ID NO: 42459 - RNA, 20 nt, Artificial Sequence
  spacer sequence TTCN PAM
uucugccagugagguggggg

SEQ ID NO: 42460 - RNA, 20 nt, Artificial Sequence
  spacer sequence TTCN PAM
gccagugaggugggggugga

SEQ ID NO: 42461 - RNA, 20 nt, Artificial Sequence
  spacer sequence TTCN PAM
ucaagugacuuggauuuggu

SEQ ID NO: 42462 - RNA, 20 nt, Artificial Sequence
  spacer sequence TTCN PAM
agugacuuggauuugguuug

SEQ ID NO: 42463 - RNA, 20 nt, Artificial Sequence
  spacer sequence TTCN PAM
ggguuuuaugugugugugug

SEQ ID NO: 42464 - RNA, 20 nt, Artificial Sequence
  spacer sequence TTCN PAM
caaaaaaaaaaaaaaaaaca

SEQ ID NO: 42465 - RNA, 20 nt, Artificial Sequence
  spacer sequence TTCN PAM
agcaguucucaaaaaaaaaa

SEQ ID NO: 42466 - RNA, 20 nt, Artificial Sequence
  spacer sequence TTCN PAM
aaaggauuguguaaaugagc

SEQ ID NO: 42467 - RNA, 20 nt, Artificial Sequence
  spacer sequence TTCN PAM
ggucgguuccagccaggcuu

SEQ ID NO: 42468 - RNA, 20 nt, Artificial Sequence
  spacer sequence TTCN PAM
agccaggcuugggggcccuu

SEQ ID NO: 42469 - RNA, 20 nt, Artificial Sequence
  spacer sequence TTCN PAM
uucauggggugggggcugcu

SEQ ID NO: 42470 - RNA, 20 nt, Artificial Sequence
  spacer sequence TTCN PAM
uggggugggggcugcugcug

SEQ ID NO: 42471 - RNA, 20 nt, Artificial Sequence
  spacer sequence TTCN PAM
caaucaggccagggagcguu

SEQ ID NO: 42472 - RNA, 20 nt, Artificial Sequence
  spacer sequence TTCN PAM
cugaaauuugccuuuucaga

SEQ ID NO: 42473 - RNA, 20 nt, Artificial Sequence
  spacer sequence TTCN PAM
gggaaaaccaugcugaucac

SEQ ID NO: 42474 - RNA, 20 nt, Artificial Sequence
  spacer sequence TTCN PAM
gaucucgucucuaaggguca

SEQ ID NO: 42475 - RNA, 20 nt, Artificial Sequence
  spacer sequence TTCN PAM
ugacccuuagagacgagauc

SEQ ID NO: 42476 - RNA, 20 nt, Artificial Sequence
  spacer sequence TTCN PAM
ucccgccucagcccucccca

SEQ ID NO: 42477 - RNA, 20 nt, Artificial Sequence
  spacer sequence TTCN PAM
cgccucagcccuccccaccg

SEQ ID NO: 42478 - RNA, 20 nt, Artificial Sequence
  spacer sequence TTCN PAM
guggggagggcugaggcggg

SEQ ID NO: 42479 - RNA, 20 nt, Artificial Sequence
  spacer sequence TTCN PAM
ucgguggggagggcugaggc

SEQ ID NO: 42480 - RNA, 20 nt, Artificial Sequence
  spacer sequence TTCN PAM
aaacgucaacaagcaacccc

SEQ ID NO: 42481 - RNA, 20 nt, Artificial Sequence
  spacer sequence TTCN PAM
uguggugggaacaugcuuug

SEQ ID NO: 42482 - RNA, 20 nt, Artificial Sequence
  spacer sequence TTCN PAM
caccacaggaaaggcaccca

SEQ ID NO: 42483 - RNA, 20 nt, Artificial Sequence
  spacer sequence TTCN PAM
cacacuaaauuuaaaucagu

SEQ ID NO: 42484 - RNA, 20 nt, Artificial Sequence
  spacer sequence TTCN PAM
uagggaaaaaagaaggaaca

SEQ ID NO: 42485 - RNA, 20 nt, Artificial Sequence
  spacer sequence TTCN PAM
cuaagaacgacugauuuaaa

SEQ ID NO: 42486 - RNA, 20 nt, Artificial Sequence
  spacer sequence TTCN PAM
uuuuucccuaagaacgacug

SEQ ID NO: 42487 - RNA, 20 nt, Artificial Sequence
  spacer sequence TTCN PAM
uucuuuuuucccuaagaacg

SEQ ID NO: 42488 - RNA, 20 nt, Artificial Sequence
  spacer sequence TTCN PAM
ccaggggcugacucgcgggg

SEQ ID NO: 42489 - RNA, 20 nt, Artificial Sequence
  spacer sequence TTCN PAM
uggcgagcuggcaggagcag

SEQ ID NO: 42490 - RNA, 20 nt, Artificial Sequence
  spacer sequence TTCN PAM
accugacagcgacguuuuug

SEQ ID NO: 42491 - RNA, 20 nt, Artificial Sequence
  spacer sequence TTCN PAM
gcaaaaacgucgcugucagg

SEQ ID NO: 42492 - RNA, 20 nt, Artificial Sequence
  spacer sequence TTCN PAM
gcuuucagcaaaaacgucgc

SEQ ID NO: 42493 - RNA, 20 nt, Artificial Sequence
  spacer sequence TTCN PAM
cacgcggggcccuguauccc

SEQ ID NO: 42494 - RNA, 20 nt, Artificial Sequence
  spacer sequence TTCN PAM
gugaggcuggcaggauucuu

SEQ ID NO: 42495 - RNA, 20 nt, Artificial Sequence
  spacer sequence TTCN PAM
ugcggcucaggugggagcuu

SEQ ID NO: 42496 - RNA, 20 nt, Artificial Sequence
  spacer sequence TTCN PAM
gcucagggacuucauuucug

SEQ ID NO: 42497 - RNA, 20 nt, Artificial Sequence
  spacer sequence TTCN PAM
uuucugaaugcguguccucu

SEQ ID NO: 42498 - RNA, 20 nt, Artificial Sequence
  spacer sequence TTCN PAM
gaaugcguguccucuuuccc

SEQ ID NO: 42499 - RNA, 20 nt, Artificial Sequence
  spacer sequence TTCN PAM
gaaaugaagucccugagcug

SEQ ID NO: 42500 - RNA, 20 nt, Artificial Sequence
  spacer sequence TTCN PAM
cagggaaagcaggcaggaug

SEQ ID NO: 42501 - RNA, 20 nt, Artificial Sequence
  spacer sequence TTCN PAM
cugggaaagaggacacgcau

SEQ ID NO: 42502 - RNA, 20 nt, Artificial Sequence
  spacer sequence TTCN PAM
aucggcgacucucccauccu

SEQ ID NO: 42503 - RNA, 20 nt, Artificial Sequence
  spacer sequence TTCN PAM
cugccuccugggcuuggggg

SEQ ID NO: 42504 - RNA, 20 nt, Artificial Sequence
  spacer sequence TTCN PAM
cccaagcccaggaggcaggg

SEQ ID NO: 42505 - RNA, 20 nt, Artificial Sequence
  spacer sequence TTCN PAM
agcuucccccaagcccagga

SEQ ID NO: 42506 - RNA, 20 nt, Artificial Sequence
  spacer sequence TTCN PAM
accucacugccgcuccaggu

SEQ ID NO: 42507 - RNA, 20 nt, Artificial Sequence
  spacer sequence TTCN PAM
gcccggaggagacagcccca

SEQ ID NO: 42508 - RNA, 20 nt, Artificial Sequence
  spacer sequence TTCN PAM
ugccugcccccaccaaagac

SEQ ID NO: 42509 - RNA, 20 nt, Artificial Sequence
  spacer sequence TTCN PAM
gucucagcacuggcacuucc

SEQ ID NO: 42510 - RNA, 20 nt, Artificial Sequence
  spacer sequence TTCN PAM
ggcccuucucaucugccaau

SEQ ID NO: 42511 - RNA, 20 nt, Artificial Sequence
  spacer sequence TTCN PAM
caucugccaauaagagacag

SEQ ID NO: 42512 - RNA, 20 nt, Artificial Sequence
  spacer sequence TTCN PAM
ggggcugucucuuauuggca

SEQ ID NO: 42513 - RNA, 20 nt, Artificial Sequence
  spacer sequence TTCN PAM
gggccuucaccuucaucugu

SEQ ID NO: 42514 - RNA, 20 nt, Artificial Sequence
  spacer sequence TTCN PAM
ccuucaucugugggccucuc

SEQ ID NO: 42515 - RNA, 20 nt, Artificial Sequence
  spacer sequence TTCN PAM
ucugugggccucucguuagu

SEQ ID NO: 42516 - RNA, 20 nt, Artificial Sequence
  spacer sequence TTCN PAM
ugagugcaggcucauuggga

SEQ ID NO: 42517 - RNA, 20 nt, Artificial Sequence
  spacer sequence TTCN PAM
gucuguguccccccaccccc

SEQ ID NO: 42518 - RNA, 20 nt, Artificial Sequence
  spacer sequence TTCN PAM
gaggccguguggcauaggcu

SEQ ID NO: 42519 - RNA, 20 nt, Artificial Sequence
  spacer sequence TTCN PAM
aguuuacugugcaucauuuc

SEQ ID NO: 42520 - RNA, 20 nt, Artificial Sequence
  spacer sequence TTCN PAM
gauguagacuucuacauucu

SEQ ID NO: 42521 - RNA, 20 nt, Artificial Sequence
  spacer sequence TTCN PAM
acauucuuuuuccugauuau

SEQ ID NO: 42522 - RNA, 20 nt, Artificial Sequence
  spacer sequence TTCN PAM
uuuuccugauuauaaaauac

SEQ ID NO: 42523 - RNA, 20 nt, Artificial Sequence
  spacer sequence TTCN PAM
ugauuauaaaauacucgcaa

SEQ ID NO: 42524 - RNA, 20 nt, Artificial Sequence
  spacer sequence TTCN PAM
uacagcuuuugcgaguauuu

SEQ ID NO: 42525 - RNA, 20 nt, Artificial Sequence
  spacer sequence TTCN PAM
ugggacaggccaguggugac

SEQ ID NO: 42526 - RNA, 20 nt, Artificial Sequence
  spacer sequence TTCN PAM
ugucugcagacagcaugggc

SEQ ID NO: 42527 - RNA, 20 nt, Artificial Sequence
  spacer sequence TTCN PAM
gugguuugaauuaagaccuc

SEQ ID NO: 42528 - RNA, 20 nt, Artificial Sequence
  spacer sequence TTCN PAM
aaccacagaagcagcugacg

SEQ ID NO: 42529 - RNA, 20 nt, Artificial Sequence
  spacer sequence TTCN PAM
aaggcgagcgcugucuugau

SEQ ID NO: 42530 - RNA, 20 nt, Artificial Sequence
  spacer sequence TTCN PAM
ggaucaagacagcgcucgcc

SEQ ID NO: 42531 - RNA, 20 nt, Artificial Sequence
  spacer sequence TTCN PAM
cauugaaucgcaggaagcuc

SEQ ID NO: 42532 - RNA, 20 nt, Artificial Sequence
  spacer sequence TTCN PAM
augagaaaacauucaggauc

SEQ ID NO: 42533 - RNA, 20 nt, Artificial Sequence
  spacer sequence TTCN PAM
ugcgauucaaugagaaaaca

SEQ ID NO: 42534 - RNA, 20 nt, Artificial Sequence
  spacer sequence TTCN PAM
ugggcggucuugacuggagc

SEQ ID NO: 42535 - RNA, 20 nt, Artificial Sequence
  spacer sequence TTCN PAM
ccaccuaccuugggucgugc

SEQ ID NO: 42536 - RNA, 20 nt, Artificial Sequence
  spacer sequence TTCN PAM
aguugugucugcccgccucu

SEQ ID NO: 42537 - RNA, 20 nt, Artificial Sequence
  spacer sequence TTCN PAM
gauuucugggcaggggacag

SEQ ID NO: 42538 - RNA, 20 nt, Artificial Sequence
  spacer sequence TTCN PAM
gggcaggggacagaguaagu

SEQ ID NO: 42539 - RNA, 20 nt, Artificial Sequence
  spacer sequence TTCN PAM
aucccaaguuacagggaaga

SEQ ID NO: 42540 - RNA, 20 nt, Artificial Sequence
  spacer sequence TTCN PAM
cuguaacuugggauggaaau

SEQ ID NO: 42541 - RNA, 20 nt, Artificial Sequence
  spacer sequence TTCN PAM
uagcuccgggcugagguggc

SEQ ID NO: 42542 - RNA, 20 nt, Artificial Sequence
  spacer sequence TTCN PAM
agacaacagcugucugccuc

SEQ ID NO: 42543 - RNA, 20 nt, Artificial Sequence
  spacer sequence TTCN PAM
gaauaggaggaaagagugug

SEQ ID NO: 42544 - RNA, 20 nt, Artificial Sequence
  spacer sequence TTCN PAM
gaacucaguaacagccuggc

SEQ ID NO: 42545 - RNA, 20 nt, Artificial Sequence
  spacer sequence TTCN PAM
uccuauucugaacucaguaa

SEQ ID NO: 42546 - RNA, 20 nt, Artificial Sequence
  spacer sequence TTCN PAM
gaguugucuuguuugccuug

SEQ ID NO: 42547 - RNA, 20 nt, Artificial Sequence
  spacer sequence TTCN PAM
uggacgccuacaaagucagg

SEQ ID NO: 42548 - RNA, 20 nt, Artificial Sequence
  spacer sequence TTCN PAM
gcccaacacacacuugaggu

SEQ ID NO: 42549 - RNA, 20 nt, Artificial Sequence
  spacer sequence TTCN PAM
ccagcgcuucccguacaccc

SEQ ID NO: 42550 - RNA, 20 nt, Artificial Sequence
  spacer sequence TTCN PAM
cguacaccccccacccccag

SEQ ID NO: 42551 - RNA, 20 nt, Artificial Sequence
  spacer sequence TTCN PAM
ucccgauuucugagcagaga

SEQ ID NO: 42552 - RNA, 20 nt, Artificial Sequence
  spacer sequence TTCN PAM
cgauuucugagcagagacuc

SEQ ID NO: 42553 - RNA, 20 nt, Artificial Sequence
  spacer sequence TTCN PAM
gagcagagacucugcgcagc

SEQ ID NO: 42554 - RNA, 20 nt, Artificial Sequence
  spacer sequence TTCN PAM
caauauggagaagucguaga

SEQ ID NO: 42555 - RNA, 20 nt, Artificial Sequence
  spacer sequence TTCN PAM
ccauauugggaaaaguagcu

SEQ ID NO: 42556 - RNA, 20 nt, Artificial Sequence
  spacer sequence TTCN PAM
ugauaacacaaucuacgacu

SEQ ID NO: 42557 - RNA, 20 nt, Artificial Sequence
  spacer sequence TTCN PAM
gccaucuagcgugugcgguc

SEQ ID NO: 42558 - RNA, 20 nt, Artificial Sequence
  spacer sequence TTCN PAM
gggagcucacacccgcucuc

SEQ ID NO: 42559 - RNA, 20 nt, Artificial Sequence
  spacer sequence TTCN PAM
ucugcuucauuuuuuccugg

SEQ ID NO: 42560 - RNA, 20 nt, Artificial Sequence
  spacer sequence TTCN PAM
uuuuuuccuggacucugacc

SEQ ID NO: 42561 - RNA, 20 nt, Artificial Sequence
  spacer sequence TTCN PAM
uggacucugaccgauguuug

SEQ ID NO: 42562 - RNA, 20 nt, Artificial Sequence
  spacer sequence TTCN PAM
aacauacucuaacgcaaaca

SEQ ID NO: 42563 - RNA, 20 nt, Artificial Sequence
  spacer sequence TTCN PAM
caaucgaccccacguucaaa

SEQ ID NO: 42564 - RNA, 20 nt, Artificial Sequence
  spacer sequence TTCN PAM
cccuguauccuccugcaaua

SEQ ID NO: 42565 - RNA, 20 nt, Artificial Sequence
  spacer sequence TTCN PAM
uagagaaacagccucuuauu

SEQ ID NO: 42566 - RNA, 20 nt, Artificial Sequence
  spacer sequence TTCN PAM
cuaggaaagagggugucagc

SEQ ID NO: 42567 - RNA, 20 nt, Artificial Sequence
  spacer sequence TTCN PAM
caaccagcugauuugaaauu

SEQ ID NO: 42568 - RNA, 20 nt, Artificial Sequence
  spacer sequence TTCN PAM
aaucagcugguugugaauaa

SEQ ID NO: 42569 - RNA, 20 nt, Artificial Sequence
  spacer sequence TTCN PAM
ugcagaucgaccccaagcca

SEQ ID NO: 42570 - RNA, 20 nt, Artificial Sequence
  spacer sequence TTCN PAM
cuccggcugcaucccccggg

SEQ ID NO: 42571 - RNA, 20 nt, Artificial Sequence
  spacer sequence TTCN PAM
gccguguucucuccggcugc

SEQ ID NO: 42572 - RNA, 20 nt, Artificial Sequence
  spacer sequence TTCN PAM
uucggccguguucucuccgg

SEQ ID NO: 42573 - RNA, 20 nt, Artificial Sequence
  spacer sequence TTCN PAM
ccacuccacguggaaaggaa

SEQ ID NO: 42574 - RNA, 20 nt, Artificial Sequence
  spacer sequence TTCN PAM
acguggaguggagaacacac

SEQ ID NO: 42575 - RNA, 20 nt, Artificial Sequence
  spacer sequence TTCN PAM
uuuccacguggaguggagaa

SEQ ID NO: 42576 - RNA, 20 nt, Artificial Sequence
  spacer sequence TTCN PAM
aucugcuguugucgcucguu

SEQ ID NO: 42577 - RNA, 20 nt, Artificial Sequence
  spacer sequence TTCN PAM
ggguuggcacucgagcagcu

SEQ ID NO: 42578 - RNA, 20 nt, Artificial Sequence
  spacer sequence TTCN PAM
uggcuguaaaacacucacgg

SEQ ID NO: 42579 - RNA, 20 nt, Artificial Sequence
  spacer sequence TTCN PAM
uacuaaucuaucuuagggaa

SEQ ID NO: 42580 - RNA, 20 nt, Artificial Sequence
  spacer sequence TTCN PAM
cuaagauagauuaguaagaa

SEQ ID NO: 42581 - RNA, 20 nt, Artificial Sequence
  spacer sequence TTCN PAM
cucugugcccugugugcccu

SEQ ID NO: 42582 - RNA, 20 nt, Artificial Sequence
  spacer sequence TTCN PAM
acugccggggcugggccggg

SEQ ID NO: 42583 - RNA, 20 nt, Artificial Sequence
  spacer sequence TTCN PAM
cugaccugcgcccuggugcu

SEQ ID NO: 42584 - RNA, 20 nt, Artificial Sequence
  spacer sequence TTCN PAM
uccagcccugcaguucucac

SEQ ID NO: 42585 - RNA, 20 nt, Artificial Sequence
  spacer sequence TTCN PAM
cacaccggcaccaggagccu

SEQ ID NO: 42586 - RNA, 20 nt, Artificial Sequence
  spacer sequence TTCN PAM
caucugcaccgccccaccag

SEQ ID NO: 42587 - RNA, 20 nt, Artificial Sequence
  spacer sequence TTCN PAM
auggggcuaagagcuuuccc

SEQ ID NO: 42588 - RNA, 20 nt, Artificial Sequence
  spacer sequence TTCN PAM
uaaggaccggagggugcguc

SEQ ID NO: 42589 - RNA, 20 nt, Artificial Sequence
  spacer sequence TTCN PAM
agcgugcugacggugggugc

SEQ ID NO: 42590 - RNA, 20 nt, Artificial Sequence
  spacer sequence TTCN PAM
cugcagccgcuuuccagcgu

SEQ ID NO: 42591 - RNA, 20 nt, Artificial Sequence
  spacer sequence TTCN PAM
cagcuccagaauuguuucac

SEQ ID NO: 42592 - RNA, 20 nt, Artificial Sequence
  spacer sequence TTCN PAM
ggagcugggaacacggccug

SEQ ID NO: 42593 - RNA, 20 nt, Artificial Sequence
  spacer sequence TTCN PAM
caagugucucucauagcugg

SEQ ID NO: 42594 - RNA, 20 nt, Artificial Sequence
  spacer sequence TTCN PAM
ggcugggagcucgcugucuc

SEQ ID NO: 42595 - RNA, 20 nt, Artificial Sequence
  spacer sequence TTCN PAM
ccaacgccugcgcccuccgg

SEQ ID NO: 42596 - RNA, 20 nt, Artificial Sequence
  spacer sequence TTCN PAM
ggagggcgcaggcguugggg

SEQ ID NO: 42597 - RNA, 20 nt, Artificial Sequence
  spacer sequence TTCN PAM
accuuuccggagggcgcagg

SEQ ID NO: 42598 - RNA, 20 nt, Artificial Sequence
  spacer sequence TTCN PAM
uggccauuucgugucccagu

SEQ ID NO: 42599 - RNA, 20 nt, Artificial Sequence
  spacer sequence TTCN PAM
ugucccaguagggugguugg

SEQ ID NO: 42600 - RNA, 20 nt, Artificial Sequence
  spacer sequence TTCN PAM
ccgcccaaccacccuacugg

SEQ ID NO: 42601 - RNA, 20 nt, Artificial Sequence
  spacer sequence TTCN PAM
gggcggccgcccgauuccau

SEQ ID NO: 42602 - RNA, 20 nt, Artificial Sequence
  spacer sequence TTCN PAM
auugugaacaccgugggguc

SEQ ID NO: 42603 - RNA, 20 nt, Artificial Sequence
  spacer sequence TTCN PAM
caauggaaucgggcggccgc

SEQ ID NO: 42604 - RNA, 20 nt, Artificial Sequence
  spacer sequence TTCN PAM
cugacacuggaccccacggu

SEQ ID NO: 42605 - RNA, 20 nt, Artificial Sequence
  spacer sequence TTCN PAM
guguaacugcccuucucuga

SEQ ID NO: 42606 - RNA, 20 nt, Artificial Sequence
  spacer sequence TTCN PAM
guguggccugggcgagccag

SEQ ID NO: 42607 - RNA, 20 nt, Artificial Sequence
  spacer sequence TTCN PAM
acugggcaggugggagaaug

SEQ ID NO: 42608 - RNA, 20 nt, Artificial Sequence
  spacer sequence TTCN PAM
cccaccugcccaguggaaag

SEQ ID NO: 42609 - RNA, 20 nt, Artificial Sequence
  spacer sequence TTCN PAM
ucaggugguaccugagggug

SEQ ID NO: 42610 - RNA, 20 nt, Artificial Sequence
  spacer sequence TTCN PAM
uggcccaggcccguggcacc

SEQ ID NO: 42611 - RNA, 20 nt, Artificial Sequence
  spacer sequence TTCN PAM
aggccccgcucaggccucuc

SEQ ID NO: 42612 - RNA, 20 nt, Artificial Sequence
  spacer sequence TTCN PAM
agugagggccgagcgugccc

SEQ ID NO: 42613 - RNA, 20 nt, Artificial Sequence
  spacer sequence TTCN PAM
cgcguuugggugggaagggc

SEQ ID NO: 42614 - RNA, 20 nt, Artificial Sequence
  spacer sequence TTCN PAM
cacccaaacgcgggaagcaa

SEQ ID NO: 42615 - RNA, 20 nt, Artificial Sequence
  spacer sequence TTCN PAM
guggggucuccuggcuccca

SEQ ID NO: 42616 - RNA, 20 nt, Artificial Sequence
  spacer sequence TTCN PAM
uguccgucagcacacacgug

SEQ ID NO: 42617 - RNA, 20 nt, Artificial Sequence
  spacer sequence TTCN PAM
cccugccugcgucuggcccu

SEQ ID NO: 42618 - RNA, 20 nt, Artificial Sequence
  spacer sequence TTCN PAM
cagacagcagccccacggag

SEQ ID NO: 42619 - RNA, 20 nt, Artificial Sequence
  spacer sequence TTCN PAM
ugggaacaggcugugcccuc

SEQ ID NO: 42620 - RNA, 20 nt, Artificial Sequence
  spacer sequence TTCN PAM
cacgaacccaaacucucgca

SEQ ID NO: 42621 - RNA, 20 nt, Artificial Sequence
  spacer sequence TTCN PAM
gagggcacagccuguuccca

SEQ ID NO: 42622 - RNA, 20 nt, Artificial Sequence
  spacer sequence TTCN PAM
aggucacggagguagucaug

SEQ ID NO: 42623 - RNA, 20 nt, Artificial Sequence
  spacer sequence TTCN PAM
cggcgucauagaucaugacu

SEQ ID NO: 42624 - RNA, 20 nt, Artificial Sequence
  spacer sequence TTCN PAM
cccugcuccucccucagaug

SEQ ID NO: 42625 - RNA, 20 nt, Artificial Sequence
  spacer sequence TTCN PAM
ugaggcuguuugcuacagcc

SEQ ID NO: 42626 - RNA, 20 nt, Artificial Sequence
  spacer sequence TTCN PAM
gccugucugugcuucccgag

SEQ ID NO: 42627 - RNA, 20 nt, Artificial Sequence
  spacer sequence TTCN PAM
cgaggucagacgucacacau

SEQ ID NO: 42628 - RNA, 20 nt, Artificial Sequence
  spacer sequence TTCN PAM
uuugaaguuuuuacgacuug

SEQ ID NO: 42629 - RNA, 20 nt, Artificial Sequence
  spacer sequence TTCN PAM
aaagaacaagccaaaaaaca

SEQ ID NO: 42630 - RNA, 20 nt, Artificial Sequence
  spacer sequence TTCN PAM
guuuuucacuguccggaaga

SEQ ID NO: 42631 - RNA, 20 nt, Artificial Sequence
  spacer sequence TTCN PAM
cuguccggaagagugugguc

SEQ ID NO: 42632 - RNA, 20 nt, Artificial Sequence
  spacer sequence TTCN PAM
ggacagugaaaaacagaagc

SEQ ID NO: 42633 - RNA, 20 nt, Artificial Sequence
  spacer sequence TTCN PAM
gcauuugaccuuccuucacc

SEQ ID NO: 42634 - RNA, 20 nt, Artificial Sequence
  spacer sequence TTCN PAM
uucacccucauccaguccuc

SEQ ID NO: 42635 - RNA, 20 nt, Artificial Sequence
  spacer sequence TTCN PAM
cccucauccaguccucccag

SEQ ID NO: 42636 - RNA, 20 nt, Artificial Sequence
  spacer sequence TTCN PAM
ugucgucagcugggucagcu

SEQ ID NO: 42637 - RNA, 20 nt, Artificial Sequence
  spacer sequence TTCN PAM
gugauccaucccaugcuuuu

SEQ ID NO: 42638 - RNA, 20 nt, Artificial Sequence
  spacer sequence TTCN PAM
uucuuucuuuuuuccuuuuc

SEQ ID NO: 42639 - RNA, 20 nt, Artificial Sequence
  spacer sequence TTCN PAM
uucuuuuuuccuuuucuuuu

SEQ ID NO: 42640 - RNA, 20 nt, Artificial Sequence
  spacer sequence TTCN PAM
uuuuuccuuuucuuuucuuu

SEQ ID NO: 42641 - RNA, 20 nt, Artificial Sequence
  spacer sequence TTCN PAM
uuuucuuuucuuuuucuuuu

SEQ ID NO: 42642 - RNA, 20 nt, Artificial Sequence
  spacer sequence TTCN PAM
uuucuuuuucuuuuuuuuca

SEQ ID NO: 42643 - RNA, 20 nt, Artificial Sequence
  spacer sequence TTCN PAM
uuuucuuuuuuuucaguuuu

SEQ ID NO: 42644 - RNA, 20 nt, Artificial Sequence
  spacer sequence TTCN PAM
uuuuuuucaguuuucucccc

SEQ ID NO: 42645 - RNA, 20 nt, Artificial Sequence
  spacer sequence TTCN PAM
guuuucuccccucucugaag

SEQ ID NO: 42646 - RNA, 20 nt, Artificial Sequence
  spacer sequence TTCN PAM
ccccucucugaagucagcag

SEQ ID NO: 42647 - RNA, 20 nt, Artificial Sequence
  spacer sequence TTCN PAM
gagaggggagaaaacugaaa

SEQ ID NO: 42648 - RNA, 20 nt, Artificial Sequence
  spacer sequence TTCN PAM
cucagcuucuugcacaccca

SEQ ID NO: 42649 - RNA, 20 nt, Artificial Sequence
  spacer sequence TTCN PAM
ugcacacccauccaugcugg

SEQ ID NO: 42650 - RNA, 20 nt, Artificial Sequence
  spacer sequence TTCN PAM
gugccccuuuuccguggcug

SEQ ID NO: 42651 - RNA, 20 nt, Artificial Sequence
  spacer sequence TTCN PAM
guggcugcugcugucugucc

SEQ ID NO: 42652 - RNA, 20 nt, Artificial Sequence
  spacer sequence TTCN PAM
ucagcugcuuuuggccggcc

SEQ ID NO: 42653 - RNA, 20 nt, Artificial Sequence
  spacer sequence TTCN PAM
aauggcaaacuaugcuccag

SEQ ID NO: 42654 - RNA, 20 nt, Artificial Sequence
  spacer sequence TTCN PAM
uaguaaaguacagugauguu

SEQ ID NO: 42655 - RNA, 20 nt, Artificial Sequence
  spacer sequence TTCN PAM
uuuucucucugugaauugug

SEQ ID NO: 42656 - RNA, 20 nt, Artificial Sequence
  spacer sequence TTCN PAM
cucugugaauugugugugau

SEQ ID NO: 42657 - RNA, 20 nt, Artificial Sequence
  spacer sequence TTCN PAM
cagagagaaaaggaaaaaca

SEQ ID NO: 42658 - RNA, 20 nt, Artificial Sequence
  spacer sequence TTCN PAM
cuucuccaggugcuaaauua

SEQ ID NO: 42659 - RNA, 20 nt, Artificial Sequence
  spacer sequence TTCN PAM
ccaggugcuaaauuauauca

SEQ ID NO: 42660 - RNA, 20 nt, Artificial Sequence
  spacer sequence TTCN PAM
uuuacaccccacuggagcaa

SEQ ID NO: 42661 - RNA, 20 nt, Artificial Sequence
  spacer sequence TTCN PAM
gguguuucugucccgcuucc

SEQ ID NO: 42662 - RNA, 20 nt, Artificial Sequence
  spacer sequence TTCN PAM
gucccgcuuccucaguggug

SEQ ID NO: 42663 - RNA, 20 nt, Artificial Sequence
  spacer sequence TTCN PAM
ucaguggugaugucgccucu

SEQ ID NO: 42664 - RNA, 20 nt, Artificial Sequence
  spacer sequence TTCN PAM
uagacagcgcucagggcgcc

SEQ ID NO: 42665 - RNA, 20 nt, Artificial Sequence
  spacer sequence TTCN PAM
gacacuccugcaguuugcga

SEQ ID NO: 42666 - RNA, 20 nt, Artificial Sequence
  spacer sequence TTCN PAM
caaacugcaggagugucuga

SEQ ID NO: 42667 - RNA, 20 nt, Artificial Sequence
  spacer sequence TTCN PAM
aaauacguuguuucaucacc

SEQ ID NO: 42668 - RNA, 20 nt, Artificial Sequence
  spacer sequence TTCN PAM
ucaccgaugcuguguuccaa

SEQ ID NO: 42669 - RNA, 20 nt, Artificial Sequence
  spacer sequence TTCN PAM
aauacugccucugaucuugg

SEQ ID NO: 42670 - RNA, 20 nt, Artificial Sequence
  spacer sequence TTCN PAM
caagaucagaggcaguauug

SEQ ID NO: 42671 - RNA, 20 nt, Artificial Sequence
  spacer sequence TTCN PAM
cgcgcgcucaaguuucccaa

SEQ ID NO: 42672 - RNA, 20 nt, Artificial Sequence
  spacer sequence TTCN PAM
agauccucccggucccccuc

SEQ ID NO: 42673 - RNA, 20 nt, Artificial Sequence
  spacer sequence TTCN PAM
ccucgcguccuguccugucc

SEQ ID NO: 42674 - RNA, 20 nt, Artificial Sequence
  spacer sequence TTCN PAM
gggccagcacguggccacau

SEQ ID NO: 42675 - RNA, 20 nt, Artificial Sequence
  spacer sequence TTCN PAM
aagcccaacagcuaaggaca

SEQ ID NO: 42676 - RNA, 20 nt, Artificial Sequence
  spacer sequence TTCN PAM
cuuggccuuucugcaucuuc

SEQ ID NO: 42677 - RNA, 20 nt, Artificial Sequence
  spacer sequence TTCN PAM
gcaucuucugagacgggucu

SEQ ID NO: 42678 - RNA, 20 nt, Artificial Sequence
  spacer sequence TTCN PAM
gagacgggucuguguccccc

SEQ ID NO: 42679 - RNA, 20 nt, Artificial Sequence
  spacer sequence TTCN PAM
ucuccacugacugaagguca

SEQ ID NO: 42680 - RNA, 20 nt, Artificial Sequence
  spacer sequence TTCN PAM
gucaguggagaggaagaggg

SEQ ID NO: 42681 - RNA, 20 nt, Artificial Sequence
  spacer sequence TTCN PAM
ccucucaguccccucagguc

SEQ ID NO: 42682 - RNA, 20 nt, Artificial Sequence
  spacer sequence TTCN PAM
ccauccugcgcuccucucgc

SEQ ID NO: 42683 - RNA, 20 nt, Artificial Sequence
  spacer sequence TTCN PAM
uggucccuccuccucuuccu

SEQ ID NO: 42684 - RNA, 20 nt, Artificial Sequence
  spacer sequence TTCN PAM
uccuccucuucccccucccc

SEQ ID NO: 42685 - RNA, 20 nt, Artificial Sequence
  spacer sequence TTCN PAM
cccucccccuccuccucccc

SEQ ID NO: 42686 - RNA, 20 nt, Artificial Sequence
  spacer sequence TTCN PAM
ggagccucccaccguccuga

SEQ ID NO: 42687 - RNA, 20 nt, Artificial Sequence
  spacer sequence TTCN PAM
gccccguuuccaucuuuccc

SEQ ID NO: 42688 - RNA, 20 nt, Artificial Sequence
  spacer sequence TTCN PAM
aucuuuccccgcccccaguu

SEQ ID NO: 42689 - RNA, 20 nt, Artificial Sequence
  spacer sequence TTCN PAM
ccgcccccaguuuugcuugu

SEQ ID NO: 42690 - RNA, 20 nt, Artificial Sequence
  spacer sequence TTCN PAM
gccuggucccagcuacagca

SEQ ID NO: 42691 - RNA, 20 nt, Artificial Sequence
  spacer sequence TTCN PAM
gcuugagaggccccacagua

SEQ ID NO: 42692 - RNA, 20 nt, Artificial Sequence
  spacer sequence TTCN PAM
gggggccguugccuguuccc

SEQ ID NO: 42693 - RNA, 20 nt, Artificial Sequence
  spacer sequence TTCN PAM
caccccccacggcccuucuc

SEQ ID NO: 42694 - RNA, 20 nt, Artificial Sequence
  spacer sequence TTCN PAM
cugccgcgcucguucacgcc

SEQ ID NO: 42695 - RNA, 20 nt, Artificial Sequence
  spacer sequence TTCN PAM
cgccucacgcccgugcugcg

SEQ ID NO: 42696 - RNA, 20 nt, Artificial Sequence
  spacer sequence TTCN PAM
gcccggucucagcucuuccc

SEQ ID NO: 42697 - RNA, 20 nt, Artificial Sequence
  spacer sequence TTCN PAM
cauguccaucuuuguucugu

SEQ ID NO: 42698 - RNA, 20 nt, Artificial Sequence
  spacer sequence TTCN PAM
gugaggucuugggcagcugu

SEQ ID NO: 42699 - RNA, 20 nt, Artificial Sequence
  spacer sequence TTCN PAM
aucuggggaggggcuggugc

SEQ ID NO: 42700 - RNA, 20 nt, Artificial Sequence
  spacer sequence TTCN PAM
uuuauacugccacucuugug

SEQ ID NO: 42701 - RNA, 20 nt, Artificial Sequence
  spacer sequence TTCN PAM
caaacacaagaguggcagua

SEQ ID NO: 42702 - RNA, 20 nt, Artificial Sequence
  spacer sequence TTCN PAM
guuuugaucccauggugcau

SEQ ID NO: 42703 - RNA, 20 nt, Artificial Sequence
  spacer sequence TTCN PAM
agcaggucagacucugcugc

SEQ ID NO: 42704 - RNA, 20 nt, Artificial Sequence
  spacer sequence TTCN PAM
cuaccuguauagaacaugca

SEQ ID NO: 42705 - RNA, 20 nt, Artificial Sequence
  spacer sequence TTCN PAM
auacagguagagaaacaaug

SEQ ID NO: 42706 - RNA, 20 nt, Artificial Sequence
  spacer sequence TTCN PAM
aggacuccuugggcuuaccc

SEQ ID NO: 42707 - RNA, 20 nt, Artificial Sequence
  spacer sequence TTCN PAM
aaagcguuaacagauacagu

SEQ ID NO: 42708 - RNA, 20 nt, Artificial Sequence
  spacer sequence TTCN PAM
cccccuuggcuugcaauuug

SEQ ID NO: 42709 - RNA, 20 nt, Artificial Sequence
  spacer sequence TTCN PAM
gagaagcauacacacaucca

SEQ ID NO: 42710 - RNA, 20 nt, Artificial Sequence
  spacer sequence TTCN PAM
cugaaacccaggauucuccc

SEQ ID NO: 42711 - RNA, 20 nt, Artificial Sequence
  spacer sequence TTCN PAM
acgcgggcccccggccugca

SEQ ID NO: 42712 - RNA, 20 nt, Artificial Sequence
  spacer sequence TTCN PAM
cuggcaaucuccccacaggc

SEQ ID NO: 42713 - RNA, 20 nt, Artificial Sequence
  spacer sequence TTCN PAM
ggcucucgccuguggggaga

SEQ ID NO: 42714 - RNA, 20 nt, Artificial Sequence
  spacer sequence TTCN PAM
agcacgggccucugacccuc

SEQ ID NO: 42715 - RNA, 20 nt, Artificial Sequence
  spacer sequence TTCN PAM
ccugucuccgcugcuguuuu

SEQ ID NO: 42716 - RNA, 20 nt, Artificial Sequence
  spacer sequence TTCN PAM
aaaucuuugugacacggagc

SEQ ID NO: 42717 - RNA, 20 nt, Artificial Sequence
  spacer sequence TTCN PAM
gcuaagcuguguguggggcg

SEQ ID NO: 42718 - RNA, 20 nt, Artificial Sequence
  spacer sequence TTCN PAM
ucauccuguuuugugucaca

SEQ ID NO: 42719 - RNA, 20 nt, Artificial Sequence
  spacer sequence TTCN PAM
cucuucgucguuggcuaggu

SEQ ID NO: 42720 - RNA, 20 nt, Artificial Sequence
  spacer sequence TTCN PAM
ucguuggcuagguuuuggau

SEQ ID NO: 42721 - RNA, 20 nt, Artificial Sequence
  spacer sequence TTCN PAM
aggacgaacaaucaguggac

SEQ ID NO: 42722 - RNA, 20 nt, Artificial Sequence
  spacer sequence TTCN PAM
uccucgaaaguaauaaaucc

SEQ ID NO: 42723 - RNA, 20 nt, Artificial Sequence
  spacer sequence TTCN PAM
cgacaucaugggcaaaaaag

SEQ ID NO: 42724 - RNA, 20 nt, Artificial Sequence
  spacer sequence TTCN PAM
cuggaaaggaacauuccuuc

SEQ ID NO: 42725 - RNA, 20 nt, Artificial Sequence
  spacer sequence TTCN PAM
agugaaaccccuaaguugcc

SEQ ID NO: 42726 - RNA, 20 nt, Artificial Sequence
  spacer sequence TTCN PAM
uuuccagugaaaccccuaag

SEQ ID NO: 42727 - RNA, 20 nt, Artificial Sequence
  spacer sequence TTCN PAM
uucacggaaagggucgggcg

SEQ ID NO: 42728 - RNA, 20 nt, Artificial Sequence
  spacer sequence TTCN PAM
cggaaagggucgggcgaguu

SEQ ID NO: 42729 - RNA, 20 nt, Artificial Sequence
  spacer sequence TTCN PAM
gugaaggaauguuccuuucc

SEQ ID NO: 42730 - RNA, 20 nt, Artificial Sequence
  spacer sequence TTCN PAM
uccugugaaccuuugcugcg

SEQ ID NO: 42731 - RNA, 20 nt, Artificial Sequence
  spacer sequence TTCN PAM
caggacgaacucgcccgacc

SEQ ID NO: 42732 - RNA, 20 nt, Artificial Sequence
  spacer sequence TTCN PAM
ccagcacccuuccugcgggg

SEQ ID NO: 42733 - RNA, 20 nt, Artificial Sequence
  spacer sequence TTCN PAM
ugcgggguggggaucucuca

SEQ ID NO: 42734 - RNA, 20 nt, Artificial Sequence
  spacer sequence TTCN PAM
aguaagauacagaaacauca

SEQ ID NO: 42735 - RNA, 20 nt, Artificial Sequence
  spacer sequence TTCN PAM
guaucuuacuggaauuaagu

SEQ ID NO: 42736 - RNA, 20 nt, Artificial Sequence
  spacer sequence TTCN PAM
agaccaacauggccuggcca

SEQ ID NO: 42737 - RNA, 20 nt, Artificial Sequence
  spacer sequence TTCN PAM
ccauguuggccaggccaugu

SEQ ID NO: 42738 - RNA, 20 nt, Artificial Sequence
  spacer sequence TTCN PAM
ccugccucagccucccaagu

SEQ ID NO: 42739 - RNA, 20 nt, Artificial Sequence
  spacer sequence TTCN PAM
agcgauucuccugccucagc

SEQ ID NO: 42740 - RNA, 20 nt, Artificial Sequence
  spacer sequence TTCN PAM
cucuuguugcccuggcugga

SEQ ID NO: 42741 - RNA, 20 nt, Artificial Sequence
  spacer sequence TTCN PAM
aguuacuccuucucuuugag

SEQ ID NO: 42742 - RNA, 20 nt, Artificial Sequence
  spacer sequence TTCN PAM
cuuugagcuaucauuauuca

SEQ ID NO: 42743 - RNA, 20 nt, Artificial Sequence
  spacer sequence TTCN PAM
cauuacauuuacauaucuua

SEQ ID NO: 42744 - RNA, 20 nt, Artificial Sequence
  spacer sequence TTCN PAM
uaacuuuauuuuugaggcag

SEQ ID NO: 42745 - RNA, 20 nt, Artificial Sequence
  spacer sequence TTCN PAM
gcccaggaggucaaggcugc

SEQ ID NO: 42746 - RNA, 20 nt, Artificial Sequence
  spacer sequence TTCN PAM
cagcuacucgggaggcugag

SEQ ID NO: 42747 - RNA, 20 nt, Artificial Sequence
  spacer sequence TTCN PAM
uuuauguccguguguacaca

SEQ ID NO: 42748 - RNA, 20 nt, Artificial Sequence
  spacer sequence TTCN PAM
ggcuuuaacagauaaaauuu

SEQ ID NO: 42749 - RNA, 20 nt, Artificial Sequence
  spacer sequence TTCN PAM
uuucagcgaggcccuguccc

SEQ ID NO: 42750 - RNA, 20 nt, Artificial Sequence
  spacer sequence TTCN PAM
gcgaggcccugucccugcuc

SEQ ID NO: 42751 - RNA, 20 nt, Artificial Sequence
  spacer sequence TTCN PAM
uuacagauacuggagcaggg

SEQ ID NO: 42752 - RNA, 20 nt, Artificial Sequence
  spacer sequence TTCN PAM
cguguuccucccacaguggg

SEQ ID NO: 42753 - RNA, 20 nt, Artificial Sequence
  spacer sequence TTCN PAM
ucccacagugggaccugaac

SEQ ID NO: 42754 - RNA, 20 nt, Artificial Sequence
  spacer sequence TTCN PAM
ggucccacugugggaggaac

SEQ ID NO: 42755 - RNA, 20 nt, Artificial Sequence
  spacer sequence TTCN PAM
ugcuccgucaucuacacgau

SEQ ID NO: 42756 - RNA, 20 nt, Artificial Sequence
  spacer sequence TTCN PAM
uccacggagugggacuuugg

SEQ ID NO: 42757 - RNA, 20 nt, Artificial Sequence
  spacer sequence TTCN PAM
ccgccgggaaagcggaagcg

SEQ ID NO: 42758 - RNA, 20 nt, Artificial Sequence
  spacer sequence TTCN PAM
cggcggcgaacacgcgcccu

SEQ ID NO: 42759 - RNA, 20 nt, Artificial Sequence
  spacer sequence TTCN PAM
gcuuucccggcggcgaacac

SEQ ID NO: 42760 - RNA, 20 nt, Artificial Sequence
  spacer sequence TTCN PAM
gaggauccggcaagauggug

SEQ ID NO: 42761 - RNA, 20 nt, Artificial Sequence
  spacer sequence TTCN PAM
uccccgcggcuacggcggcu

SEQ ID NO: 42762 - RNA, 20 nt, Artificial Sequence
  spacer sequence TTCN PAM
cagccccgcgucgucccgac

SEQ ID NO: 42763 - RNA, 20 nt, Artificial Sequence
  spacer sequence TTCN PAM
uguccggguccucguaaccc

SEQ ID NO: 42764 - RNA, 20 nt, Artificial Sequence
  spacer sequence TTCN PAM
acccguccccggggaucacu

SEQ ID NO: 42765 - RNA, 20 nt, Artificial Sequence
  spacer sequence TTCN PAM
guccccggcggcgccgcgcg

SEQ ID NO: 42766 - RNA, 20 nt, Artificial Sequence
  spacer sequence TTCN PAM
gcgguguccucgggcccggu

SEQ ID NO: 42767 - RNA, 20 nt, Artificial Sequence
  spacer sequence TTCN PAM
gccugugcgggcgcggaucg

SEQ ID NO: 42768 - RNA, 20 nt, Artificial Sequence
  spacer sequence TTCN PAM
gcucuacuucugccugugcg

SEQ ID NO: 42769 - RNA, 20 nt, Artificial Sequence
  spacer sequence TTCN PAM
ucugcucuacuucugccugu

SEQ ID NO: 42770 - RNA, 20 nt, Artificial Sequence
  spacer sequence TTCN PAM
ucuucugcucuacuucugcc

SEQ ID NO: 42771 - RNA, 20 nt, Artificial Sequence
  spacer sequence TTCN PAM
gcaaguucaccuaccgcggc

SEQ ID NO: 42772 - RNA, 20 nt, Artificial Sequence
  spacer sequence TTCN PAM
ccuaccgcggcguggaccuc

SEQ ID NO: 42773 - RNA, 20 nt, Artificial Sequence
  spacer sequence TTCN PAM
aaacccgcgcggagaccgug

SEQ ID NO: 42774 - RNA, 20 nt, Artificial Sequence
  spacer sequence TTCN PAM
gggcgcaagaccacacucag

SEQ ID NO: 42775 - RNA, 20 nt, Artificial Sequence
  spacer sequence TTCN PAM
cuuuuccgcggcuuaguugg

SEQ ID NO: 42776 - RNA, 20 nt, Artificial Sequence
  spacer sequence TTCN PAM
gcggcuuaguuggaaggugu

SEQ ID NO: 42777 - RNA, 20 nt, Artificial Sequence
  spacer sequence TTCN PAM
aacuaagccgcggaaaagug

SEQ ID NO: 42778 - RNA, 20 nt, Artificial Sequence
  spacer sequence TTCN PAM
aagucacgugggcuacagac

SEQ ID NO: 42779 - RNA, 20 nt, Artificial Sequence
  spacer sequence TTCN PAM
aggcagggugguggugggca

SEQ ID NO: 42780 - RNA, 20 nt, Artificial Sequence
  spacer sequence TTCN PAM
agcgauucucuugccucagc

SEQ ID NO: 42781 - RNA, 20 nt, Artificial Sequence
  spacer sequence TTCN PAM
cuugccucagccucucgagu

SEQ ID NO: 42782 - RNA, 20 nt, Artificial Sequence
  spacer sequence TTCN PAM
guguugcccaggcuggucuc

SEQ ID NO: 42783 - RNA, 20 nt, Artificial Sequence
  spacer sequence TTCN PAM
cgccuguaaucccagcacuu

SEQ ID NO: 42784 - RNA, 20 nt, Artificial Sequence
  spacer sequence TTCN PAM
acaaauaaucaaaaaucaag

SEQ ID NO: 42785 - RNA, 20 nt, Artificial Sequence
  spacer sequence TTCN PAM
cugugucguccagguugguc

SEQ ID NO: 42786 - RNA, 20 nt, Artificial Sequence
  spacer sequence TTCN PAM
agaccaaccuggacgacaca

SEQ ID NO: 42787 - RNA, 20 nt, Artificial Sequence
  spacer sequence TTCN PAM
ggagguugaggcgggagggu

SEQ ID NO: 42788 - RNA, 20 nt, Artificial Sequence
  spacer sequence TTCN PAM
ccugcguuuuuagaggccuu

SEQ ID NO: 42789 - RNA, 20 nt, Artificial Sequence
  spacer sequence TTCN PAM
cucugaaucucugcagucac

SEQ ID NO: 42790 - RNA, 20 nt, Artificial Sequence
  spacer sequence TTCN PAM
gagagaacaagcggcccgga

SEQ ID NO: 42791 - RNA, 20 nt, Artificial Sequence
  spacer sequence TTCN PAM
uuguagucacuacaauggac

SEQ ID NO: 42792 - RNA, 20 nt, Artificial Sequence
  spacer sequence TTCN PAM
cuccagggacagagccgcag

SEQ ID NO: 42793 - RNA, 20 nt, Artificial Sequence
  spacer sequence TTCN PAM
cuguccgccggagugcguag

SEQ ID NO: 42794 - RNA, 20 nt, Artificial Sequence
  spacer sequence TTCN PAM
gccgccgccgcuggcgcgca

SEQ ID NO: 42795 - RNA, 20 nt, Artificial Sequence
  spacer sequence TTCN PAM
gccgcaggccccgguucagc

SEQ ID NO: 42796 - RNA, 20 nt, Artificial Sequence
  spacer sequence TTCN PAM
gcagggagugcugcuuccgc

SEQ ID NO: 42797 - RNA, 20 nt, Artificial Sequence
  spacer sequence TTCN PAM
uggccuugcgcaggcgcuuc

SEQ ID NO: 42798 - RNA, 20 nt, Artificial Sequence
  spacer sequence TTCN PAM
ccaugggcggcgccuccuuc

SEQ ID NO: 42799 - RNA, 20 nt, Artificial Sequence
  spacer sequence TTCN PAM
ggcuucuccaugggcggcgc

SEQ ID NO: 42800 - RNA, 20 nt, Artificial Sequence
  spacer sequence TTCN PAM
ccacuuccggcuucuccaug

SEQ ID NO: 42801 - RNA, 20 nt, Artificial Sequence
  spacer sequence TTCN PAM
accagguggagaucaaggug

SEQ ID NO: 42802 - RNA, 20 nt, Artificial Sequence
  spacer sequence TTCN PAM
ccaucaccuacaagcccgua

SEQ ID NO: 42803 - RNA, 20 nt, Artificial Sequence
  spacer sequence TTCN PAM
ucccucucaaguaauggcuc

SEQ ID NO: 42804 - RNA, 20 nt, Artificial Sequence
  spacer sequence TTCN PAM
uccuggcgucccgagcucug

SEQ ID NO: 42805 - RNA, 20 nt, Artificial Sequence
  spacer sequence TTCN PAM
uggcgucccgagcucuggga

SEQ ID NO: 42806 - RNA, 20 nt, Artificial Sequence
  spacer sequence TTCN PAM
gguucguggugugaggaggu

SEQ ID NO: 42807 - RNA, 20 nt, Artificial Sequence
  spacer sequence TTCN PAM
uggugugaggagguucaggu

SEQ ID NO: 42808 - RNA, 20 nt, Artificial Sequence
  spacer sequence TTCN PAM
gguuggacguucgggggugu

SEQ ID NO: 42809 - RNA, 20 nt, Artificial Sequence
  spacer sequence TTCN PAM
ggggugugugguaguguugu

SEQ ID NO: 42810 - RNA, 20 nt, Artificial Sequence
  spacer sequence TTCN PAM
acaccaagagaccauccaca

SEQ ID NO: 42811 - RNA, 20 nt, Artificial Sequence
  spacer sequence TTCN PAM
ugaccucggggcagcugccu

SEQ ID NO: 42812 - RNA, 20 nt, Artificial Sequence
  spacer sequence TTCN PAM
ggguaccucacguagagggg

SEQ ID NO: 42813 - RNA, 20 nt, Artificial Sequence
  spacer sequence TTCN PAM
ggcuucccucaucuccugug

SEQ ID NO: 42814 - RNA, 20 nt, Artificial Sequence
  spacer sequence TTCN PAM
cucaucuccuguggaggguu

SEQ ID NO: 42815 - RNA, 20 nt, Artificial Sequence
  spacer sequence TTCN PAM
cgcaggaagugaagcagcag

SEQ ID NO: 42816 - RNA, 20 nt, Artificial Sequence
  spacer sequence TTCN PAM
ugcgggaacccuccacagga

SEQ ID NO: 42817 - RNA, 20 nt, Artificial Sequence
  spacer sequence TTCN PAM
cuuccugcgggaacccucca

SEQ ID NO: 42818 - RNA, 20 nt, Artificial Sequence
  spacer sequence TTCN PAM
ugcugcugcuucacuuccug

SEQ ID NO: 42819 - RNA, 20 nt, Artificial Sequence
  spacer sequence TTCN PAM
auccucaccccugcuuggcu

SEQ ID NO: 42820 - RNA, 20 nt, Artificial Sequence
  spacer sequence TTCN PAM
uagaagcuccugacucuccu

SEQ ID NO: 42821 - RNA, 20 nt, Artificial Sequence
  spacer sequence TTCN PAM
aagaagccaagcagggguga

SEQ ID NO: 42822 - RNA, 20 nt, Artificial Sequence
  spacer sequence TTCN PAM
gugcaaaggagacagagcug

SEQ ID NO: 42823 - RNA, 20 nt, Artificial Sequence
  spacer sequence TTCN PAM
agcauucugugcaaaggaga

SEQ ID NO: 42824 - RNA, 20 nt, Artificial Sequence
  spacer sequence TTCN PAM
uucaagcauucugugcaaag

SEQ ID NO: 42825 - RNA, 20 nt, Artificial Sequence
  spacer sequence TTCN PAM
ccaacccacguacggccauc

SEQ ID NO: 42826 - RNA, 20 nt, Artificial Sequence
  spacer sequence TTCN PAM
caccauguucuccaacccac

SEQ ID NO: 42827 - RNA, 20 nt, Artificial Sequence
  spacer sequence TTCN PAM
augcuggagucaccucagcc

SEQ ID NO: 42828 - RNA, 20 nt, Artificial Sequence
  spacer sequence TTCN PAM
gggcugaggugacuccagca

SEQ ID NO: 42829 - RNA, 20 nt, Artificial Sequence
  spacer sequence TTCN PAM
cccucaaauggcccacaaca

SEQ ID NO: 42830 - RNA, 20 nt, Artificial Sequence
  spacer sequence TTCN PAM
auaauguuucuccacuuuuu

SEQ ID NO: 42831 - RNA, 20 nt, Artificial Sequence
  spacer sequence TTCN PAM
ccacuuuuuuuuuuaaauuu

SEQ ID NO: 42832 - RNA, 20 nt, Artificial Sequence
  spacer sequence TTCN PAM
cacugcuucccaaagugcug

SEQ ID NO: 42833 - RNA, 20 nt, Artificial Sequence
  spacer sequence TTCN PAM
caaagugcugggaucacagg

SEQ ID NO: 42834 - RNA, 20 nt, Artificial Sequence
  spacer sequence TTCN PAM
ccugccccagccuccugagu

SEQ ID NO: 42835 - RNA, 20 nt, Artificial Sequence
  spacer sequence TTCN PAM
ugccauucuccugccccagc

SEQ ID NO: 42836 - RNA, 20 nt, Artificial Sequence
  spacer sequence TTCN PAM
cucucaacaauauuuuuuuu

SEQ ID NO: 42837 - RNA, 20 nt, Artificial Sequence
  spacer sequence TTCN PAM
uucucucucaacaauauuuu

SEQ ID NO: 42838 - RNA, 20 nt, Artificial Sequence
  spacer sequence TTCN PAM
uuccuucucucucaacaaua

SEQ ID NO: 42839 - RNA, 20 nt, Artificial Sequence
  spacer sequence TTCN PAM
uuccuuccuucucucucaac

SEQ ID NO: 42840 - RNA, 20 nt, Artificial Sequence
  spacer sequence TTCN PAM
cucucucugucccuuccuuc

SEQ ID NO: 42841 - RNA, 20 nt, Artificial Sequence
  spacer sequence TTCN PAM
uuuucccucucucugucccu

SEQ ID NO: 42842 - RNA, 20 nt, Artificial Sequence
  spacer sequence TTCN PAM
uuccuuuucccucucucugu

SEQ ID NO: 42843 - RNA, 20 nt, Artificial Sequence
  spacer sequence TTCN PAM
cuuucuuuccuuuucccucu

SEQ ID NO: 42844 - RNA, 20 nt, Artificial Sequence
  spacer sequence TTCN PAM
uucucuuucuuuccuuuucc

SEQ ID NO: 42845 - RNA, 20 nt, Artificial Sequence
  spacer sequence TTCN PAM
uuucuuucucuuucuuuccu

SEQ ID NO: 42846 - RNA, 20 nt, Artificial Sequence
  spacer sequence TTCN PAM
uuccuuucuuucucuuucuu

SEQ ID NO: 42847 - RNA, 20 nt, Artificial Sequence
  spacer sequence TTCN PAM
uucuuuccuuucuuucucuu

SEQ ID NO: 42848 - RNA, 20 nt, Artificial Sequence
  spacer sequence TTCN PAM
ccuuccuucuuuccuuucuu

SEQ ID NO: 42849 - RNA, 20 nt, Artificial Sequence
  spacer sequence TTCN PAM
ucuccuuccuucuuuccuuu

SEQ ID NO: 42850 - RNA, 20 nt, Artificial Sequence
  spacer sequence TTCN PAM
uuuuucuucuccuuccuucu

SEQ ID NO: 42851 - RNA, 20 nt, Artificial Sequence
  spacer sequence TTCN PAM
uuccuuuuucuucuccuucc

SEQ ID NO: 42852 - RNA, 20 nt, Artificial Sequence
  spacer sequence TTCN PAM
cucucuccuuccuuccuuuu

SEQ ID NO: 42853 - RNA, 20 nt, Artificial Sequence
  spacer sequence TTCN PAM
uucucucucuccuuccuucc

SEQ ID NO: 42854 - RNA, 20 nt, Artificial Sequence
  spacer sequence TTCN PAM
uuuuuuucuuucucucucuc

SEQ ID NO: 42855 - RNA, 20 nt, Artificial Sequence
  spacer sequence TTCN PAM
uuuuucuuuuuuuucuuucu

SEQ ID NO: 42856 - RNA, 20 nt, Artificial Sequence
  spacer sequence TTCN PAM
cuuuauuuccuuuuucuuuu

SEQ ID NO: 42857 - RNA, 20 nt, Artificial Sequence
  spacer sequence TTCN PAM
ucucuuuauuuccuuuuucu

SEQ ID NO: 42858 - RNA, 20 nt, Artificial Sequence
  spacer sequence TTCN PAM
uuacuuucuucucuuuauuu

SEQ ID NO: 42859 - RNA, 20 nt, Artificial Sequence
  spacer sequence TTCN PAM
ucuuuacuuucuucucuuua

SEQ ID NO: 42860 - RNA, 20 nt, Artificial Sequence
  spacer sequence TTCN PAM
cccuuuucuucuuuacuuuc

SEQ ID NO: 42861 - RNA, 20 nt, Artificial Sequence
  spacer sequence TTCN PAM
uuucucccuuuucuucuuua

SEQ ID NO: 42862 - RNA, 20 nt, Artificial Sequence
  spacer sequence TTCN PAM
uuucuuuucucccuuuucuu

SEQ ID NO: 42863 - RNA, 20 nt, Artificial Sequence
  spacer sequence TTCN PAM
uuuccuuucuuuucucccuu

SEQ ID NO: 42864 - RNA, 20 nt, Artificial Sequence
  spacer sequence TTCN PAM
uuccuuuccuuucuuuucuc

SEQ ID NO: 42865 - RNA, 20 nt, Artificial Sequence
  spacer sequence TTCN PAM
cuuuccuuccuuuccuuucu

SEQ ID NO: 42866 - RNA, 20 nt, Artificial Sequence
  spacer sequence TTCN PAM
uucucuuuccuuccuuuccu

SEQ ID NO: 42867 - RNA, 20 nt, Artificial Sequence
  spacer sequence TTCN PAM
uccuucucuuuccuuccuuu

SEQ ID NO: 42868 - RNA, 20 nt, Artificial Sequence
  spacer sequence TTCN PAM
guucuuccuucucuuuccuu

SEQ ID NO: 42869 - RNA, 20 nt, Artificial Sequence
  spacer sequence TTCN PAM
uccguucuuccuucucuuuc

SEQ ID NO: 42870 - RNA, 20 nt, Artificial Sequence
  spacer sequence TTCN PAM
uuucuuccguucuuccuucu

SEQ ID NO: 42871 - RNA, 20 nt, Artificial Sequence
  spacer sequence TTCN PAM
cucucgccuuccuuucuucc

SEQ ID NO: 42872 - RNA, 20 nt, Artificial Sequence
  spacer sequence TTCN PAM
uucucucucgccuuccuuuc

SEQ ID NO: 42873 - RNA, 20 nt, Artificial Sequence
  spacer sequence TTCN PAM
uuuucuuucucucucgccuu

SEQ ID NO: 42874 - RNA, 20 nt, Artificial Sequence
  spacer sequence TTCN PAM
uuucuuuuucuuucucucuc

SEQ ID NO: 42875 - RNA, 20 nt, Artificial Sequence
  spacer sequence TTCN PAM
ucuuucuuuucuuuuucuuu

SEQ ID NO: 42876 - RNA, 20 nt, Artificial Sequence
  spacer sequence TTCN PAM
uccucuuucuuuucuuuuuc

SEQ ID NO: 42877 - RNA, 20 nt, Artificial Sequence
  spacer sequence TTCN PAM
uucuuccucuuucuuuucuu

SEQ ID NO: 42878 - RNA, 20 nt, Artificial Sequence
  spacer sequence TTCN PAM
uuuuucuuucuuccucuuuc

SEQ ID NO: 42879 - RNA, 20 nt, Artificial Sequence
  spacer sequence TTCN PAM
cuuuccuuuuucuuucuucc

SEQ ID NO: 42880 - RNA, 20 nt, Artificial Sequence
  spacer sequence TTCN PAM
uucucuuuccuuuuucuuuc

SEQ ID NO: 42881 - RNA, 20 nt, Artificial Sequence
  spacer sequence TTCN PAM
uucuuucucuuuccuuuuuc

SEQ ID NO: 42882 - RNA, 20 nt, Artificial Sequence
  spacer sequence TTCN PAM
uuccuucuuucucuuuccuu

SEQ ID NO: 42883 - RNA, 20 nt, Artificial Sequence
  spacer sequence TTCN PAM
uucuuuccuucuuucucuuu

SEQ ID NO: 42884 - RNA, 20 nt, Artificial Sequence
  spacer sequence TTCN PAM
uucuuucuuuccuucuuucu

SEQ ID NO: 42885 - RNA, 20 nt, Artificial Sequence
  spacer sequence TTCN PAM
uuuucuuucuuucuuuccuu

SEQ ID NO: 42886 - RNA, 20 nt, Artificial Sequence
  spacer sequence TTCN PAM
uuuccuuuucuuucuuucuu

SEQ ID NO: 42887 - RNA, 20 nt, Artificial Sequence
  spacer sequence TTCN PAM
uuccuuuccuuuucuuucuu

SEQ ID NO: 42888 - RNA, 20 nt, Artificial Sequence
  spacer sequence TTCN PAM
cccaccucggccucccaaag

SEQ ID NO: 42889 - RNA, 20 nt, Artificial Sequence
  spacer sequence TTCN PAM
ccauguuggccaggaugguc

SEQ ID NO: 42890 - RNA, 20 nt, Artificial Sequence
  spacer sequence TTCN PAM
uuuuuuaguagagauggguu

SEQ ID NO: 42891 - RNA, 20 nt, Artificial Sequence
  spacer sequence TTCN PAM
uuccuuuuuuaguagagaug

SEQ ID NO: 42892 - RNA, 20 nt, Artificial Sequence
  spacer sequence TTCN PAM
cuuuccuuccuuuuuuagua

SEQ ID NO: 42893 - RNA, 20 nt, Artificial Sequence
  spacer sequence TTCN PAM
uucucuuuccuuccuuuuuu

SEQ ID NO: 42894 - RNA, 20 nt, Artificial Sequence
  spacer sequence TTCN PAM
uccuucucuuuccuuccuuu

SEQ ID NO: 42895 - RNA, 20 nt, Artificial Sequence
  spacer sequence TTCN PAM
uuucuuccuucucuuuccuu

SEQ ID NO: 42896 - RNA, 20 nt, Artificial Sequence
  spacer sequence TTCN PAM
uuccuuucuuccuucucuuu

SEQ ID NO: 42897 - RNA, 20 nt, Artificial Sequence
  spacer sequence TTCN PAM
uuccuuccuuucuuccuucu

SEQ ID NO: 42898 - RNA, 20 nt, Artificial Sequence
  spacer sequence TTCN PAM
uucuuuccuuccuuucuucc

SEQ ID NO: 42899 - RNA, 20 nt, Artificial Sequence
  spacer sequence TTCN PAM
uuccuucuuuccuuccuuuc

SEQ ID NO: 42900 - RNA, 20 nt, Artificial Sequence
  spacer sequence TTCN PAM
uuacuuccuuccuucuuucc

SEQ ID NO: 42901 - RNA, 20 nt, Artificial Sequence
  spacer sequence TTCN PAM
uuuucuuuacuuccuuccuu

SEQ ID NO: 42902 - RNA, 20 nt, Artificial Sequence
  spacer sequence TTCN PAM
uuccuuuucuuuacuuccuu

SEQ ID NO: 42903 - RNA, 20 nt, Artificial Sequence
  spacer sequence TTCN PAM
ucccucccucccuuccuucc

SEQ ID NO: 42904 - RNA, 20 nt, Artificial Sequence
  spacer sequence TTCN PAM
caccauucuccugccuaagc

SEQ ID NO: 42905 - RNA, 20 nt, Artificial Sequence
  spacer sequence TTCN PAM
ccugccuaagccuccugaau

SEQ ID NO: 42906 - RNA, 20 nt, Artificial Sequence
  spacer sequence TTCN PAM
ggaggcuuaggcaggagaau

SEQ ID NO: 42907 - RNA, 20 nt, Artificial Sequence
  spacer sequence TTCN PAM
guagagacaggguuucaccg

SEQ ID NO: 42908 - RNA, 20 nt, Artificial Sequence
  spacer sequence TTCN PAM
ccguguucgcuaggaucucg

SEQ ID NO: 42909 - RNA, 20 nt, Artificial Sequence
  spacer sequence TTCN PAM
cuaggaucucgucucgauuu

SEQ ID NO: 42910 - RNA, 20 nt, Artificial Sequence
  spacer sequence TTCN PAM
ugaccuugugauccgaccgc

SEQ ID NO: 42911 - RNA, 20 nt, Artificial Sequence
  spacer sequence TTCN PAM
aaagaguaggaggcuuggcc

SEQ ID NO: 42912 - RNA, 20 nt, Artificial Sequence
  spacer sequence TTCN PAM
cuccaucccaugaccuagac

SEQ ID NO: 42913 - RNA, 20 nt, Artificial Sequence
  spacer sequence TTCN PAM
ccaccgucuaggucauggga

SEQ ID NO: 42914 - RNA, 20 nt, Artificial Sequence
  spacer sequence TTCN PAM
guaucugggucuuccugccu

SEQ ID NO: 42915 - RNA, 20 nt, Artificial Sequence
  spacer sequence TTCN PAM
ugccuccucuugcuguauag

SEQ ID NO: 42916 - RNA, 20 nt, Artificial Sequence
  spacer sequence TTCN PAM
guggcucagacccgcccggg

SEQ ID NO: 42917 - RNA, 20 nt, Artificial Sequence
  spacer sequence TTCN PAM
uaacaaccacgagaaccaca

SEQ ID NO: 42918 - RNA, 20 nt, Artificial Sequence
  spacer sequence TTCN PAM
cgugguuguuaugaacagcu

SEQ ID NO: 42919 - RNA, 20 nt, Artificial Sequence
  spacer sequence TTCN PAM
gugguucucgugguuguuau

SEQ ID NO: 42920 - RNA, 20 nt, Artificial Sequence
  spacer sequence TTCN PAM
ucaggugcaggcgguggccc

SEQ ID NO: 42921 - RNA, 20 nt, Artificial Sequence
  spacer sequence TTCN PAM
ggugcaggcgguggccccag

SEQ ID NO: 42922 - RNA, 20 nt, Artificial Sequence
  spacer sequence TTCN PAM
ccugcggcaccggggcgugg

SEQ ID NO: 42923 - RNA, 20 nt, Artificial Sequence
  spacer sequence TTCN PAM
cugacgggcaguacuuucac

SEQ ID NO: 42924 - RNA, 20 nt, Artificial Sequence
  spacer sequence TTCN PAM
ccacauccccagaucuuccc

SEQ ID NO: 42925 - RNA, 20 nt, Artificial Sequence
  spacer sequence TTCN PAM
gcaggggagccgggucccau

SEQ ID NO: 42926 - RNA, 20 nt, Artificial Sequence
  spacer sequence TTCN PAM
uuguccuuccccagcaggug

SEQ ID NO: 42927 - RNA, 20 nt, Artificial Sequence
  spacer sequence TTCN PAM
ccagcaggugcucucuggga

SEQ ID NO: 42928 - RNA, 20 nt, Artificial Sequence
  spacer sequence TTCN PAM
gggacucccagagagcaccu

SEQ ID NO: 42929 - RNA, 20 nt, Artificial Sequence
  spacer sequence TTCN PAM
aaauaucaagagucccagcc

SEQ ID NO: 42930 - RNA, 20 nt, Artificial Sequence
  spacer sequence TTCN PAM
guccccuccaagcccccacu

SEQ ID NO: 42931 - RNA, 20 nt, Artificial Sequence
  spacer sequence TTCN PAM
cgucuaucccggucccaccc

SEQ ID NO: 42932 - RNA, 20 nt, Artificial Sequence
  spacer sequence TTCN PAM
ucaaccuggggccggugggu

SEQ ID NO: 42933 - RNA, 20 nt, Artificial Sequence
  spacer sequence TTCN PAM
gcuucgucaaccuggggccg

SEQ ID NO: 42934 - RNA, 20 nt, Artificial Sequence
  spacer sequence TTCN PAM
gcguugcuauggcgccgggg

SEQ ID NO: 42935 - RNA, 20 nt, Artificial Sequence
  spacer sequence TTCN PAM
acucccagggggccuugcgg

SEQ ID NO: 42936 - RNA, 20 nt, Artificial Sequence
  spacer sequence TTCN PAM
cgccccuccuggcugaguag

SEQ ID NO: 42937 - RNA, 20 nt, Artificial Sequence
  spacer sequence TTCN PAM
guuagaucuucgcgccccuc

SEQ ID NO: 42938 - RNA, 20 nt, Artificial Sequence
  spacer sequence TTCN PAM
gcagacccacacccucggga

SEQ ID NO: 42939 - RNA, 20 nt, Artificial Sequence
  spacer sequence TTCN PAM
cauuuguacaacgacaagac

SEQ ID NO: 42940 - RNA, 20 nt, Artificial Sequence
  spacer sequence TTCN PAM
cuggguuagucuugucguug

SEQ ID NO: 42941 - RNA, 20 nt, Artificial Sequence
  spacer sequence TTCN PAM
cuguugcgauaacgcguccu

SEQ ID NO: 42942 - RNA, 20 nt, Artificial Sequence
  spacer sequence TTCN PAM
aacacaccccuccuucgaga

SEQ ID NO: 42943 - RNA, 20 nt, Artificial Sequence
  spacer sequence TTCN PAM
agaaucagcccggccuccug

SEQ ID NO: 42944 - RNA, 20 nt, Artificial Sequence
  spacer sequence TTCN PAM
cgaaggagggguguguugga

SEQ ID NO: 42945 - RNA, 20 nt, Artificial Sequence
  spacer sequence TTCN PAM
gauuaggccggacaggaggc

SEQ ID NO: 42946 - RNA, 20 nt, Artificial Sequence
  spacer sequence TTCN PAM
uuugcguaaucccgccuccu

SEQ ID NO: 42947 - RNA, 20 nt, Artificial Sequence
  spacer sequence TTCN PAM
cgccccuaccauuccgcccu

SEQ ID NO: 42948 - RNA, 20 nt, Artificial Sequence
  spacer sequence TTCN PAM
gcccugccuccuuugugauc

SEQ ID NO: 42949 - RNA, 20 nt, Artificial Sequence
  spacer sequence TTCN PAM
uuggcgagaccaguggaggg

SEQ ID NO: 42950 - RNA, 20 nt, Artificial Sequence
  spacer sequence TTCN PAM
ccaaucggcucggauguuuc

SEQ ID NO: 42951 - RNA, 20 nt, Artificial Sequence
  spacer sequence TTCN PAM
uuagccccuccccccgguuc

SEQ ID NO: 42952 - RNA, 20 nt, Artificial Sequence
  spacer sequence TTCN PAM
gcccccccacgccucuccuc

SEQ ID NO: 42953 - RNA, 20 nt, Artificial Sequence
  spacer sequence TTCN PAM
gccaauaaucccauccucug

SEQ ID NO: 42954 - RNA, 20 nt, Artificial Sequence
  spacer sequence TTCN PAM
aaucagcuacgucucgcucc

SEQ ID NO: 42955 - RNA, 20 nt, Artificial Sequence
  spacer sequence TTCN PAM
cgcagccugagccgcgaugc

SEQ ID NO: 42956 - RNA, 20 nt, Artificial Sequence
  spacer sequence TTCN PAM
uggagcaaaggaaccugguc

SEQ ID NO: 42957 - RNA, 20 nt, Artificial Sequence
  spacer sequence TTCN PAM
uuugcuccaggaagugcucc

SEQ ID NO: 42958 - RNA, 20 nt, Artificial Sequence
  spacer sequence TTCN PAM
gugaccagguuccuuugcuc

SEQ ID NO: 42959 - RNA, 20 nt, Artificial Sequence
  spacer sequence TTCN PAM
ccaccccggucuuggccucc

SEQ ID NO: 42960 - RNA, 20 nt, Artificial Sequence
  spacer sequence TTCN PAM
ccgacgggcacaccgaggcc

SEQ ID NO: 42961 - RNA, 20 nt, Artificial Sequence
  spacer sequence TTCN PAM
ccggcuacgggguccggucc

SEQ ID NO: 42962 - RNA, 20 nt, Artificial Sequence
  spacer sequence TTCN PAM
cuugcccgcgcccugcgacc

SEQ ID NO: 42963 - RNA, 20 nt, Artificial Sequence
  spacer sequence TTCN PAM
gccccuggccgccccccgac

SEQ ID NO: 42964 - RNA, 20 nt, Artificial Sequence
  spacer sequence TTCN PAM
gggcgcugggugccugccau

SEQ ID NO: 42965 - RNA, 20 nt, Artificial Sequence
  spacer sequence TTCN PAM
gcauggcaggcacccagcgc

SEQ ID NO: 42966 - RNA, 20 nt, Artificial Sequence
  spacer sequence TTCN PAM
uccaguugcccaguggcccc

SEQ ID NO: 42967 - RNA, 20 nt, Artificial Sequence
  spacer sequence TTCN PAM
aguugcccaguggccccaga

SEQ ID NO: 42968 - RNA, 20 nt, Artificial Sequence
  spacer sequence TTCN PAM
ccgucccccuucccccgugg

SEQ ID NO: 42969 - RNA, 20 nt, Artificial Sequence
  spacer sequence TTCN PAM
cccguggaccccggccuggc

SEQ ID NO: 42970 - RNA, 20 nt, Artificial Sequence
  spacer sequence TTCN PAM
cguuuuucugaggggaggcu

SEQ ID NO: 42971 - RNA, 20 nt, Artificial Sequence
  spacer sequence TTCN PAM
gaggggaggcuccuggcggg

SEQ ID NO: 42972 - RNA, 20 nt, Artificial Sequence
  spacer sequence TTCN PAM
cgccaggagccuccccucag

SEQ ID NO: 42973 - RNA, 20 nt, Artificial Sequence
  spacer sequence TTCN PAM
ccuucccgccaggagccucc

SEQ ID NO: 42974 - RNA, 20 nt, Artificial Sequence
  spacer sequence TTCN PAM
ccuuuccuccuccucuccug

SEQ ID NO: 42975 - RNA, 20 nt, Artificial Sequence
  spacer sequence TTCN PAM
uccuccucuccugcccuagc

SEQ ID NO: 42976 - RNA, 20 nt, Artificial Sequence
  spacer sequence TTCN PAM
cccagcucaauggcuuagug

SEQ ID NO: 42977 - RNA, 20 nt, Artificial Sequence
  spacer sequence TTCN PAM
uccgugacuuucacccuugg

SEQ ID NO: 42978 - RNA, 20 nt, Artificial Sequence
  spacer sequence TTCN PAM
gugacuuucacccuugguga

SEQ ID NO: 42979 - RNA, 20 nt, Artificial Sequence
  spacer sequence TTCN PAM
cccuuggugacgcugcgcgc

SEQ ID NO: 42980 - RNA, 20 nt, Artificial Sequence
  spacer sequence TTCN PAM
ccuuuccaaaucucuagcaa

SEQ ID NO: 42981 - RNA, 20 nt, Artificial Sequence
  spacer sequence TTCN PAM
aaaucucuagcaagagcaug

SEQ ID NO: 42982 - RNA, 20 nt, Artificial Sequence
  spacer sequence TTCN PAM
agcgauucuccugccucagu

SEQ ID NO: 42983 - RNA, 20 nt, Artificial Sequence
  spacer sequence TTCN PAM
ccugccucagucuaccaagu

SEQ ID NO: 42984 - RNA, 20 nt, Artificial Sequence
  spacer sequence TTCN PAM
acauggugaaacgggguuuc

SEQ ID NO: 42985 - RNA, 20 nt, Artificial Sequence
  spacer sequence TTCN PAM
ccauguugaacggcuaaaaa

SEQ ID NO: 42986 - RNA, 20 nt, Artificial Sequence
  spacer sequence TTCN PAM
ccauguuggccaggcugguc

SEQ ID NO: 42987 - RNA, 20 nt, Artificial Sequence
  spacer sequence TTCN PAM
agaccagccuggccaacaug

SEQ ID NO: 42988 - RNA, 20 nt, Artificial Sequence
  spacer sequence TTCN PAM
gggcucaagcgauccuccug

SEQ ID NO: 42989 - RNA, 20 nt, Artificial Sequence
  spacer sequence TTCN PAM
accuguaaucccagagcuuu

SEQ ID NO: 42990 - RNA, 20 nt, Artificial Sequence
  spacer sequence TTCN PAM
uccguuuguguggugcuccc

SEQ ID NO: 42991 - RNA, 20 nt, Artificial Sequence
  spacer sequence TTCN PAM
guuuguguggugcucccagc

SEQ ID NO: 42992 - RNA, 20 nt, Artificial Sequence
  spacer sequence TTCN PAM
cuuccaggaagcuccgcaga

SEQ ID NO: 42993 - RNA, 20 nt, Artificial Sequence
  spacer sequence TTCN PAM
aggaagcuccgcagaaugac

SEQ ID NO: 42994 - RNA, 20 nt, Artificial Sequence
  spacer sequence TTCN PAM
uggaagagaaggcagagcca

SEQ ID NO: 42995 - RNA, 20 nt, Artificial Sequence
  spacer sequence TTCN PAM
gcggagcuuccuggaagaga

SEQ ID NO: 42996 - RNA, 20 nt, Artificial Sequence
  spacer sequence TTCN PAM
ggguagaggacagugccacu

SEQ ID NO: 42997 - RNA, 20 nt, Artificial Sequence
  spacer sequence TTCN PAM
gcagguggaucccaggaguc

SEQ ID NO: 42998 - RNA, 20 nt, Artificial Sequence
  spacer sequence TTCN PAM
cccccaauuuucccaccauc

SEQ ID NO: 42999 - RNA, 20 nt, Artificial Sequence
  spacer sequence TTCN PAM
caccaucuggggguucccau

SEQ ID NO: 43000 - RNA, 20 nt, Artificial Sequence
  spacer sequence TTCN PAM
caugccaggcagcgccagaa

SEQ ID NO: 43001 - RNA, 20 nt, Artificial Sequence
  spacer sequence TTCN PAM
ggcgcugccuggcaugggaa

SEQ ID NO: 43002 - RNA, 20 nt, Artificial Sequence
  spacer sequence TTCN PAM
gacuguucuggcgcugccug

SEQ ID NO: 43003 - RNA, 20 nt, Artificial Sequence
  spacer sequence TTCN PAM
acaucccuggggcuaguggg

SEQ ID NO: 43004 - RNA, 20 nt, Artificial Sequence
  spacer sequence TTCN PAM
ugcccacuagccccagggau

SEQ ID NO: 43005 - RNA, 20 nt, Artificial Sequence
  spacer sequence TTCN PAM
ucucuggugacacggugccc

SEQ ID NO: 43006 - RNA, 20 nt, Artificial Sequence
  spacer sequence TTCN PAM
gucugaagcauacaguccuc

SEQ ID NO: 43007 - RNA, 20 nt, Artificial Sequence
  spacer sequence TTCN PAM
gacagaacaggcacagaggc

SEQ ID NO: 43008 - RNA, 20 nt, Artificial Sequence
  spacer sequence TTCN PAM
gauguccaaggucauccucc

SEQ ID NO: 43009 - RNA, 20 nt, Artificial Sequence
  spacer sequence TTCN PAM
gcgacgggaggaugaccuug

SEQ ID NO: 43010 - RNA, 20 nt, Artificial Sequence
  spacer sequence TTCN PAM
ugcagcuucagcgacgggag

SEQ ID NO: 43011 - RNA, 20 nt, Artificial Sequence
  spacer sequence TTCN PAM
uccccacgagccaggcccgg

SEQ ID NO: 43012 - RNA, 20 nt, Artificial Sequence
  spacer sequence TTCN PAM
uauguuacccaggggugugg

SEQ ID NO: 43013 - RNA, 20 nt, Artificial Sequence
  spacer sequence TTCN PAM
ucguauguuacccaggggug

SEQ ID NO: 43014 - RNA, 20 nt, Artificial Sequence
  spacer sequence TTCN PAM
ggaccaaagggcagaggccc

SEQ ID NO: 43015 - RNA, 20 nt, Artificial Sequence
  spacer sequence TTCN PAM
uccuccccuggggcugcuau

SEQ ID NO: 43016 - RNA, 20 nt, Artificial Sequence
  spacer sequence TTCN PAM
uccuccuccccuggggcugc

SEQ ID NO: 43017 - RNA, 20 nt, Artificial Sequence
  spacer sequence TTCN PAM
cugugugaccuugggcaaca

SEQ ID NO: 43018 - RNA, 20 nt, Artificial Sequence
  spacer sequence TTCN PAM
acagccaaaacugggggugg

SEQ ID NO: 43019 - RNA, 20 nt, Artificial Sequence
  spacer sequence TTCN PAM
ggaaaagcacaaaaccuggc

SEQ ID NO: 43020 - RNA, 20 nt, Artificial Sequence
  spacer sequence TTCN PAM
ugaauuauucaacagccaaa

SEQ ID NO: 43021 - RNA, 20 nt, Artificial Sequence
  spacer sequence TTCN PAM
uuucagagccagguucagga

SEQ ID NO: 43022 - RNA, 20 nt, Artificial Sequence
  spacer sequence TTCN PAM
gagccagguucaggauuggg

SEQ ID NO: 43023 - RNA, 20 nt, Artificial Sequence
  spacer sequence TTCN PAM
ggauuggggcugagcuggac

SEQ ID NO: 43024 - RNA, 20 nt, Artificial Sequence
  spacer sequence TTCN PAM
cugaacacccuccuugcugg

SEQ ID NO: 43025 - RNA, 20 nt, Artificial Sequence
  spacer sequence TTCN PAM
gagaaaaacgugugugugug

SEQ ID NO: 43026 - RNA, 20 nt, Artificial Sequence
  spacer sequence TTCN PAM
ggcaacuauaacacaguccc

SEQ ID NO: 43027 - RNA, 20 nt, Artificial Sequence
  spacer sequence TTCN PAM
gcacauuuauuaagugccuu

SEQ ID NO: 43028 - RNA, 20 nt, Artificial Sequence
  spacer sequence TTCN PAM
ccauguuggccaggcugguc

SEQ ID NO: 43029 - RNA, 20 nt, Artificial Sequence
  spacer sequence TTCN PAM
ccugccucaaccuccugagu

SEQ ID NO: 43030 - RNA, 20 nt, Artificial Sequence
  spacer sequence TTCN PAM
agauggagucuugcucuguc

SEQ ID NO: 43031 - RNA, 20 nt, Artificial Sequence
  spacer sequence TTCN PAM
auuuauuuucgagauggagu

SEQ ID NO: 43032 - RNA, 20 nt, Artificial Sequence
  spacer sequence TTCN PAM
gcacguuuauuucuauuuau

SEQ ID NO: 43033 - RNA, 20 nt, Artificial Sequence
  spacer sequence TTCN PAM
cucuguuaacuuguaaccau

SEQ ID NO: 43034 - RNA, 20 nt, Artificial Sequence
  spacer sequence TTCN PAM
cccuugguaagugggaguag

SEQ ID NO: 43035 - RNA, 20 nt, Artificial Sequence
  spacer sequence TTCN PAM
caaaggggguagcccugccc

SEQ ID NO: 43036 - RNA, 20 nt, Artificial Sequence
  spacer sequence TTCN PAM
cccucuccaccgaaaacaac

SEQ ID NO: 43037 - RNA, 20 nt, Artificial Sequence
  spacer sequence TTCN PAM
guggagagggggaaguggcu

SEQ ID NO: 43038 - RNA, 20 nt, Artificial Sequence
  spacer sequence TTCN PAM
ugguuguuuucgguggagag

SEQ ID NO: 43039 - RNA, 20 nt, Artificial Sequence
  spacer sequence TTCN PAM
gggccgggucauucuugguu

SEQ ID NO: 43040 - RNA, 20 nt, Artificial Sequence
  spacer sequence TTCN PAM
cugccuuggcacugcugaug

SEQ ID NO: 43041 - RNA, 20 nt, Artificial Sequence
  spacer sequence TTCN PAM
ucuguuaucuuagcgcaggg

SEQ ID NO: 43042 - RNA, 20 nt, Artificial Sequence
  spacer sequence TTCN PAM
cagcucuagaaucaagucuu

SEQ ID NO: 43043 - RNA, 20 nt, Artificial Sequence
  spacer sequence TTCN PAM
agagcugagaaaggcaacug

SEQ ID NO: 43044 - RNA, 20 nt, Artificial Sequence
  spacer sequence TTCN PAM
ugacagccuggccucccuug

SEQ ID NO: 43045 - RNA, 20 nt, Artificial Sequence
  spacer sequence TTCN PAM
gccaucccuuauauugaaac

SEQ ID NO: 43046 - RNA, 20 nt, Artificial Sequence
  spacer sequence TTCN PAM
auauaagggauggcagaaac

SEQ ID NO: 43047 - RNA, 20 nt, Artificial Sequence
  spacer sequence TTCN PAM
cagugccucccaaagggccu

SEQ ID NO: 43048 - RNA, 20 nt, Artificial Sequence
  spacer sequence TTCN PAM
aggcccuuugggaggcacug

SEQ ID NO: 43049 - RNA, 20 nt, Artificial Sequence
  spacer sequence TTCN PAM
ccugccucagccuccccagc

SEQ ID NO: 43050 - RNA, 20 nt, Artificial Sequence
  spacer sequence TTCN PAM
ccguguuagccaggaugguc

SEQ ID NO: 43051 - RNA, 20 nt, Artificial Sequence
  spacer sequence TTCN PAM
cugggcagcuauuccgcacc

SEQ ID NO: 43052 - RNA, 20 nt, Artificial Sequence
  spacer sequence TTCN PAM
gcacccacccccacugccca

SEQ ID NO: 43053 - RNA, 20 nt, Artificial Sequence
  spacer sequence TTCN PAM
uugaccuccugggcucaagc

SEQ ID NO: 43054 - RNA, 20 nt, Artificial Sequence
  spacer sequence TTCN PAM
gucacccaggcuggagugca

SEQ ID NO: 43055 - RNA, 20 nt, Artificial Sequence
  spacer sequence TTCN PAM
uugugagacagggucuuguu

SEQ ID NO: 43056 - RNA, 20 nt, Artificial Sequence
  spacer sequence TTCN PAM
uuuauucauugugagacagg

SEQ ID NO: 43057 - RNA, 20 nt, Artificial Sequence
  spacer sequence TTCN PAM
uucauuuauucauugugaga

SEQ ID NO: 43058 - RNA, 20 nt, Artificial Sequence
  spacer sequence TTCN PAM
uucauucauuuauucauugu

SEQ ID NO: 43059 - RNA, 20 nt, Artificial Sequence
  spacer sequence TTCN PAM
gggugaugagaauguucugg

SEQ ID NO: 43060 - RNA, 20 nt, Artificial Sequence
  spacer sequence TTCN PAM
caucacccugaaaagcagcu

SEQ ID NO: 43061 - RNA, 20 nt, Artificial Sequence
  spacer sequence TTCN PAM
ggaauuagauagcggugaug

SEQ ID NO: 43062 - RNA, 20 nt, Artificial Sequence
  spacer sequence TTCN PAM
agaacauucucaucacccug

SEQ ID NO: 43063 - RNA, 20 nt, Artificial Sequence
  spacer sequence TTCN PAM
agaccagucuggccaacaug

SEQ ID NO: 43064 - RNA, 20 nt, Artificial Sequence
  spacer sequence TTCN PAM
ccauguuggccagacugguc

SEQ ID NO: 43065 - RNA, 20 nt, Artificial Sequence
  spacer sequence TTCN PAM
cuacuaaaaauacaaaaauu

SEQ ID NO: 43066 - RNA, 20 nt, Artificial Sequence
  spacer sequence TTCN PAM
gccucagccucccgaguagc

SEQ ID NO: 43067 - RNA, 20 nt, Artificial Sequence
  spacer sequence TTCN PAM
ucugccucagccucccgagu

SEQ ID NO: 43068 - RNA, 20 nt, Artificial Sequence
  spacer sequence TTCN PAM
agcgauucuucugccucagc

SEQ ID NO: 43069 - RNA, 20 nt, Artificial Sequence
  spacer sequence TTCN PAM
cucuuggcccaggccacagu

SEQ ID NO: 43070 - RNA, 20 nt, Artificial Sequence
  spacer sequence TTCN PAM
gugggguuuuuuuuuggaga

SEQ ID NO: 43071 - RNA, 20 nt, Artificial Sequence
  spacer sequence TTCN PAM
aaaaaguggcuuuggccagg

SEQ ID NO: 43072 - RNA, 20 nt, Artificial Sequence
  spacer sequence TTCN PAM
uggacucaagcaguuaaccc

SEQ ID NO: 43073 - RNA, 20 nt, Artificial Sequence
  spacer sequence TTCN PAM
agaccagucuagucuaggca

SEQ ID NO: 43074 - RNA, 20 nt, Artificial Sequence
  spacer sequence TTCN PAM
cacuacuugggaggcugagc

SEQ ID NO: 43075 - RNA, 20 nt, Artificial Sequence
  spacer sequence TTCN PAM
ugaccucccaggcucaggcg

SEQ ID NO: 43076 - RNA, 20 nt, Artificial Sequence
  spacer sequence TTCN PAM
uugagacagggucucaccca

SEQ ID NO: 43077 - RNA, 20 nt, Artificial Sequence
  spacer sequence TTCN PAM
acaaaagcuaccuuuuuugu

SEQ ID NO: 43078 - RNA, 20 nt, Artificial Sequence
  spacer sequence TTCN PAM
cauuccacaaaagcuaccuu

SEQ ID NO: 43079 - RNA, 20 nt, Artificial Sequence
  spacer sequence TTCN PAM
augaaaaaagaacagccuug

SEQ ID NO: 43080 - RNA, 20 nt, Artificial Sequence
  spacer sequence TTCN PAM
uugaauaaaaucucagggac

SEQ ID NO: 43081 - RNA, 20 nt, Artificial Sequence
  spacer sequence TTCN PAM
uuuuucauugaauaaaaucu

SEQ ID NO: 43082 - RNA, 20 nt, Artificial Sequence
  spacer sequence TTCN PAM
auacgugugguuuuaucaag

SEQ ID NO: 43083 - RNA, 20 nt, Artificial Sequence
  spacer sequence TTCN PAM
ggccauguugcccacuuuuu

SEQ ID NO: 43084 - RNA, 20 nt, Artificial Sequence
  spacer sequence TTCN PAM
guugggggugccuggggaga

SEQ ID NO: 43085 - RNA, 20 nt, Artificial Sequence
  spacer sequence TTCN PAM
ucugaggcugcaggcuccca

SEQ ID NO: 43086 - RNA, 20 nt, Artificial Sequence
  spacer sequence TTCN PAM
cccucugcagagaaaccuga

SEQ ID NO: 43087 - RNA, 20 nt, Artificial Sequence
  spacer sequence TTCN PAM
cugcagagggugaagccagg

SEQ ID NO: 43088 - RNA, 20 nt, Artificial Sequence
  spacer sequence TTCN PAM
gguuucucugcagaggguga

SEQ ID NO: 43089 - RNA, 20 nt, Artificial Sequence
  spacer sequence TTCN PAM
cccugcuuuucuccacugcu

SEQ ID NO: 43090 - RNA, 20 nt, Artificial Sequence
  spacer sequence TTCN PAM
ccacugcuagacccucaugc

SEQ ID NO: 43091 - RNA, 20 nt, Artificial Sequence
  spacer sequence TTCN PAM
cacucugggcccuggcccug

SEQ ID NO: 43092 - RNA, 20 nt, Artificial Sequence
  spacer sequence TTCN PAM
agcucccaagcugcagccac

SEQ ID NO: 43093 - RNA, 20 nt, Artificial Sequence
  spacer sequence TTCN PAM
ugcugccuggacgccucucc

SEQ ID NO: 43094 - RNA, 20 nt, Artificial Sequence
  spacer sequence TTCN PAM
cugaggacgugacauugagu

SEQ ID NO: 43095 - RNA, 20 nt, Artificial Sequence
  spacer sequence TTCN PAM
ggccccgucaucugcccucc

SEQ ID NO: 43096 - RNA, 20 nt, Artificial Sequence
  spacer sequence TTCN PAM
gcaugugucacugcagaucu

SEQ ID NO: 43097 - RNA, 20 nt, Artificial Sequence
  spacer sequence TTCN PAM
agcucauaaggguacacauu

SEQ ID NO: 43098 - RNA, 20 nt, Artificial Sequence
  spacer sequence TTCN PAM
ccucucuugcuguccuccaa

SEQ ID NO: 43099 - RNA, 20 nt, Artificial Sequence
  spacer sequence TTCN PAM
aggaaccagucccugagcuc

SEQ ID NO: 43100 - RNA, 20 nt, Artificial Sequence
  spacer sequence TTCN PAM
uggaaaguuggaggacagca

SEQ ID NO: 43101 - RNA, 20 nt, Artificial Sequence
  spacer sequence TTCN PAM
gaucacagccauccuuuccc

SEQ ID NO: 43102 - RNA, 20 nt, Artificial Sequence
  spacer sequence TTCN PAM
ccgcucacuuuucucacuuu

SEQ ID NO: 43103 - RNA, 20 nt, Artificial Sequence
  spacer sequence TTCN PAM
cacuuuaucuccccaaaccg

SEQ ID NO: 43104 - RNA, 20 nt, Artificial Sequence
  spacer sequence TTCN PAM
ugacugucccgguuugggga

SEQ ID NO: 43105 - RNA, 20 nt, Artificial Sequence
  spacer sequence TTCN PAM
guccucugugguucuugacu

SEQ ID NO: 43106 - RNA, 20 nt, Artificial Sequence
  spacer sequence TTCN PAM
gccccuccuuggcucgugga

SEQ ID NO: 43107 - RNA, 20 nt, Artificial Sequence
  spacer sequence TTCN PAM
acgagccaaggaggggcaga

SEQ ID NO: 43108 - RNA, 20 nt, Artificial Sequence
  spacer sequence TTCN PAM
cacagcucggggucgugggc

SEQ ID NO: 43109 - RNA, 20 nt, Artificial Sequence
  spacer sequence TTCN PAM
ccuccugggggaccugaagg

SEQ ID NO: 43110 - RNA, 20 nt, Artificial Sequence
  spacer sequence TTCN PAM
ggucccccaggaggggaaag

SEQ ID NO: 43111 - RNA, 20 nt, Artificial Sequence
  spacer sequence TTCN PAM
gugucccguggcgccuucag

SEQ ID NO: 43112 - RNA, 20 nt, Artificial Sequence
  spacer sequence TTCN PAM
gggccagcuuugauugcgcc

SEQ ID NO: 43113 - RNA, 20 nt, Artificial Sequence
  spacer sequence TTCN PAM
cgagccaggaaaaaaaaaaa

SEQ ID NO: 43114 - RNA, 20 nt, Artificial Sequence
  spacer sequence TTCN PAM
uggcucgggaaagaugcuuu

SEQ ID NO: 43115 - RNA, 20 nt, Artificial Sequence
  spacer sequence TTCN PAM
acggaggggguucccugcga

SEQ ID NO: 43116 - RNA, 20 nt, Artificial Sequence
  spacer sequence TTCN PAM
cugcgaccuuucagagcagc

SEQ ID NO: 43117 - RNA, 20 nt, Artificial Sequence
  spacer sequence TTCN PAM
gagcagcgccuuguuccaau

SEQ ID NO: 43118 - RNA, 20 nt, Artificial Sequence
  spacer sequence TTCN PAM
aauuuggggacggggggguc

SEQ ID NO: 43119 - RNA, 20 nt, Artificial Sequence
  spacer sequence TTCN PAM
gagacccccccguccccaaa

SEQ ID NO: 43120 - RNA, 20 nt, Artificial Sequence
  spacer sequence TTCN PAM
accaccaguaacauccacgc

SEQ ID NO: 43121 - RNA, 20 nt, Artificial Sequence
  spacer sequence TTCN PAM
gagcccaccuaacgguaguc

SEQ ID NO: 43122 - RNA, 20 nt, Artificial Sequence
  spacer sequence TTCN PAM
acuuuccgagcccaccuaac

SEQ ID NO: 43123 - RNA, 20 nt, Artificial Sequence
  spacer sequence TTCN PAM
gaggccucugguccucuugg

SEQ ID NO: 43124 - RNA, 20 nt, Artificial Sequence
  spacer sequence TTCN PAM
ccuugacuccuuccgaggcc

SEQ ID NO: 43125 - RNA, 20 nt, Artificial Sequence
  spacer sequence TTCN PAM
caggacuggggcgagcccaa

SEQ ID NO: 43126 - RNA, 20 nt, Artificial Sequence
  spacer sequence TTCN PAM
ugggcucgccccaguccugg

SEQ ID NO: 43127 - RNA, 20 nt, Artificial Sequence
  spacer sequence TTCN PAM
cgcacgcccuccccgauccg

SEQ ID NO: 43128 - RNA, 20 nt, Artificial Sequence
  spacer sequence TTCN PAM
gggagcagggcucaugggcg

SEQ ID NO: 43129 - RNA, 20 nt, Artificial Sequence
  spacer sequence TTCN PAM
uggggcgcuccugggguggc

SEQ ID NO: 43130 - RNA, 20 nt, Artificial Sequence
  spacer sequence TTCN PAM
cgugagacgcagggggugcc

SEQ ID NO: 43131 - RNA, 20 nt, Artificial Sequence
  spacer sequence TTCN PAM
ugcgcgcugggccaggggcg

SEQ ID NO: 43132 - RNA, 20 nt, Artificial Sequence
  spacer sequence TTCN PAM
gggacuggcugccggacggc

SEQ ID NO: 43133 - RNA, 20 nt, Artificial Sequence
  spacer sequence TTCN PAM
gccggccguucagggacugg

SEQ ID NO: 43134 - RNA, 20 nt, Artificial Sequence
  spacer sequence TTCN PAM
ccuauaguaaaagacauccc

SEQ ID NO: 43135 - RNA, 20 nt, Artificial Sequence
  spacer sequence TTCN PAM
gggcacuucuucccucuccc

SEQ ID NO: 43136 - RNA, 20 nt, Artificial Sequence
  spacer sequence TTCN PAM
ucccucucccagcccugcgg

SEQ ID NO: 43137 - RNA, 20 nt, Artificial Sequence
  spacer sequence TTCN PAM
cucucccagcccugcgggag

SEQ ID NO: 43138 - RNA, 20 nt, Artificial Sequence
  spacer sequence TTCN PAM
gcuccauugcgcccggcucc

SEQ ID NO: 43139 - RNA, 20 nt, Artificial Sequence
  spacer sequence TTCN PAM
ggcccgcgggcccccgcccu

SEQ ID NO: 43140 - RNA, 20 nt, Artificial Sequence
  spacer sequence TTCN PAM
gcccccuccccgcgcucgcc

SEQ ID NO: 43141 - RNA, 20 nt, Artificial Sequence
  spacer sequence TTCN PAM
gacuagugggguccuuuccu

SEQ ID NO: 43142 - RNA, 20 nt, Artificial Sequence
  spacer sequence TTCN PAM
uccgaccuuucuccagccca

SEQ ID NO: 43143 - RNA, 20 nt, Artificial Sequence
  spacer sequence TTCN PAM
ccagcccaagucuuggggac

SEQ ID NO: 43144 - RNA, 20 nt, Artificial Sequence
  spacer sequence TTCN PAM
ccgcccuccuggucucccag

SEQ ID NO: 43145 - RNA, 20 nt, Artificial Sequence
  spacer sequence TTCN PAM
gagcuuuuuacgagcgucca

SEQ ID NO: 43146 - RNA, 20 nt, Artificial Sequence
  spacer sequence TTCN PAM
cccgugaccaccccuuccac

SEQ ID NO: 43147 - RNA, 20 nt, Artificial Sequence
  spacer sequence TTCN PAM
acgcccccaaguucccucca

SEQ ID NO: 43148 - RNA, 20 nt, Artificial Sequence
  spacer sequence TTCN PAM
cuccaguagcuuuuuuuuuu

SEQ ID NO: 43149 - RNA, 20 nt, Artificial Sequence
  spacer sequence TTCN PAM
aguuguuaugccucagccuc

SEQ ID NO: 43150 - RNA, 20 nt, Artificial Sequence
  spacer sequence TTCN PAM
acggacggcuaauuuuugua

SEQ ID NO: 43151 - RNA, 20 nt, Artificial Sequence
  spacer sequence TTCN PAM
ccauguuggccaggcuggac

SEQ ID NO: 43152 - RNA, 20 nt, Artificial Sequence
  spacer sequence TTCN PAM
aguccagccuggccaacaug

SEQ ID NO: 43153 - RNA, 20 nt, Artificial Sequence
  spacer sequence TTCN PAM
ggugaucagcccacuucggc

SEQ ID NO: 43154 - RNA, 20 nt, Artificial Sequence
  spacer sequence TTCN PAM
gccucccaaagcgcugggau

SEQ ID NO: 43155 - RNA, 20 nt, Artificial Sequence
  spacer sequence TTCN PAM
aaaagcagcuggacggggcg

SEQ ID NO: 43156 - RNA, 20 nt, Artificial Sequence
  spacer sequence TTCN PAM
uggauuuugaggguucaaaa

SEQ ID NO: 43157 - RNA, 20 nt, Artificial Sequence
  spacer sequence TTCN PAM
aggaccuuccugcggaaucg

SEQ ID NO: 43158 - RNA, 20 nt, Artificial Sequence
  spacer sequence TTCN PAM
ugcggaaucgcccacccccu

SEQ ID NO: 43159 - RNA, 20 nt, Artificial Sequence
  spacer sequence TTCN PAM
gcaggaagguccuggaacuc

SEQ ID NO: 43160 - RNA, 20 nt, Artificial Sequence
  spacer sequence TTCN PAM
ccagccagccagagggaucc

SEQ ID NO: 43161 - RNA, 20 nt, Artificial Sequence
  spacer sequence TTCN PAM
ggaucccucuggcuggcugg

SEQ ID NO: 43162 - RNA, 20 nt, Artificial Sequence
  spacer sequence TTCN PAM
auuucaggaucccucuggcu

SEQ ID NO: 43163 - RNA, 20 nt, Artificial Sequence
  spacer sequence TTCN PAM
cccugacagcgucgcuccca

SEQ ID NO: 43164 - RNA, 20 nt, Artificial Sequence
  spacer sequence TTCN PAM
aggacugagucuagcugcug

SEQ ID NO: 43165 - RNA, 20 nt, Artificial Sequence
  spacer sequence TTCN PAM
uuuauuuauuuagagacgga

SEQ ID NO: 43166 - RNA, 20 nt, Artificial Sequence
  spacer sequence TTCN PAM
uccaacagcaagcauuuauu

SEQ ID NO: 43167 - RNA, 20 nt, Artificial Sequence
  spacer sequence TTCN PAM
gucacagcggggaccacccg

SEQ ID NO: 43168 - RNA, 20 nt, Artificial Sequence
  spacer sequence TTCN PAM
guguucagucacagcgggga

SEQ ID NO: 43169 - RNA, 20 nt, Artificial Sequence
  spacer sequence TTCN PAM
ucuguguucagucacagcgg

SEQ ID NO: 43170 - RNA, 20 nt, Artificial Sequence
  spacer sequence TTCN PAM
cagcuaggagcaggcuuccu

SEQ ID NO: 43171 - RNA, 20 nt, Artificial Sequence
  spacer sequence TTCN PAM
ucaucccaggccugaguuac

SEQ ID NO: 43172 - RNA, 20 nt, Artificial Sequence
  spacer sequence TTCN PAM
acuugaaggucccagucagc

SEQ ID NO: 43173 - RNA, 20 nt, Artificial Sequence
  spacer sequence TTCN PAM
aguggaaugugauggugccg

SEQ ID NO: 43174 - RNA, 20 nt, Artificial Sequence
  spacer sequence TTCN PAM
ucuaucccagacugggggac

SEQ ID NO: 43175 - RNA, 20 nt, Artificial Sequence
  spacer sequence TTCN PAM
ggcuuccggagacacugcca

SEQ ID NO: 43176 - RNA, 20 nt, Artificial Sequence
  spacer sequence TTCN PAM
ggagacacugccaaucauaa

SEQ ID NO: 43177 - RNA, 20 nt, Artificial Sequence
  spacer sequence TTCN PAM
uuuuuagaaacggaguuucg

SEQ ID NO: 43178 - RNA, 20 nt, Artificial Sequence
  spacer sequence TTCN PAM
aaaaaagaaaaaagcaaagg

SEQ ID NO: 43179 - RNA, 20 nt, Artificial Sequence
  spacer sequence TTCN PAM
cucuuguugcccaggcugga

SEQ ID NO: 43180 - RNA, 20 nt, Artificial Sequence
  spacer sequence TTCN PAM
agccugggcaacaagagcga

SEQ ID NO: 43181 - RNA, 20 nt, Artificial Sequence
  spacer sequence TTCN PAM
ccugccucagccucccaagu

SEQ ID NO: 43182 - RNA, 20 nt, Artificial Sequence
  spacer sequence TTCN PAM
guagagacgggguuucucca

SEQ ID NO: 43183 - RNA, 20 nt, Artificial Sequence
  spacer sequence TTCN PAM
ccauguuggucagguugguc

SEQ ID NO: 43184 - RNA, 20 nt, Artificial Sequence
  spacer sequence TTCN PAM
cccgccuuggccucccaaag

SEQ ID NO: 43185 - RNA, 20 nt, Artificial Sequence
  spacer sequence TTCN PAM
caggcucaaacgauccuccc

SEQ ID NO: 43186 - RNA, 20 nt, Artificial Sequence
  spacer sequence TTCN PAM
uuguguuguccaggaugguc

SEQ ID NO: 43187 - RNA, 20 nt, Artificial Sequence
  spacer sequence TTCN PAM
agaccauccuggacaacaca

SEQ ID NO: 43188 - RNA, 20 nt, Artificial Sequence
  spacer sequence TTCN PAM
ccugccugggccucccaaag

SEQ ID NO: 43189 - RNA, 20 nt, Artificial Sequence
  spacer sequence TTCN PAM
uuucucuuuuugggacacag

SEQ ID NO: 43190 - RNA, 20 nt, Artificial Sequence
  spacer sequence TTCN PAM
cuuuuugggacacagucuca

SEQ ID NO: 43191 - RNA, 20 nt, Artificial Sequence
  spacer sequence TTCN PAM
gucacccaggcuggagugca

SEQ ID NO: 43192 - RNA, 20 nt, Artificial Sequence
  spacer sequence TTCN PAM
agcgauucuccuuccucagc

SEQ ID NO: 43193 - RNA, 20 nt, Artificial Sequence
  spacer sequence TTCN PAM
ccuuccucagccucccgagu

SEQ ID NO: 43194 - RNA, 20 nt, Artificial Sequence
  spacer sequence TTCN PAM
ucagccucccgaguagcugg

SEQ ID NO: 43195 - RNA, 20 nt, Artificial Sequence
  spacer sequence TTCN PAM
ccacguuggccaggcugguc

SEQ ID NO: 43196 - RNA, 20 nt, Artificial Sequence
  spacer sequence TTCN PAM
agaccagccuggccaacgug

SEQ ID NO: 43197 - RNA, 20 nt, Artificial Sequence
  spacer sequence TTCN PAM
uagcaccccacguggaaaca

SEQ ID NO: 43198 - RNA, 20 nt, Artificial Sequence
  spacer sequence TTCN PAM
acguggggugcuaagaagca

SEQ ID NO: 43199 - RNA, 20 nt, Artificial Sequence
  spacer sequence TTCN PAM
augggggccaccccuaugcc

SEQ ID NO: 43200 - RNA, 20 nt, Artificial Sequence
  spacer sequence TTCN PAM
gcugcgccugagcccacgug

SEQ ID NO: 43201 - RNA, 20 nt, Artificial Sequence
  spacer sequence TTCN PAM
cgcuccuuguuaaaaaucau

SEQ ID NO: 43202 - RNA, 20 nt, Artificial Sequence
  spacer sequence TTCN PAM
gccuuugccacuauuuuggu

SEQ ID NO: 43203 - RNA, 20 nt, Artificial Sequence
  spacer sequence TTCN PAM
gggcgcuuccguccaggggg

SEQ ID NO: 43204 - RNA, 20 nt, Artificial Sequence
  spacer sequence TTCN PAM
guccagggggucaccauucg

SEQ ID NO: 43205 - RNA, 20 nt, Artificial Sequence
  spacer sequence TTCN PAM
gaucccccgguagagauggg

SEQ ID NO: 43206 - RNA, 20 nt, Artificial Sequence
  spacer sequence TTCN PAM
ccaucucuaccgggggaucc

SEQ ID NO: 43207 - RNA, 20 nt, Artificial Sequence
  spacer sequence TTCN PAM
cgccgggacgcgccgcuccg

SEQ ID NO: 43208 - RNA, 20 nt, Artificial Sequence
  spacer sequence TTCN PAM
cccucugucaccgggaacaa

SEQ ID NO: 43209 - RNA, 20 nt, Artificial Sequence
  spacer sequence TTCN PAM
cggugacagagggggaaacu

SEQ ID NO: 43210 - RNA, 20 nt, Artificial Sequence
  spacer sequence TTCN PAM
gggggccgggccgggccggg

SEQ ID NO: 43211 - RNA, 20 nt, Artificial Sequence
  spacer sequence TTCN PAM
guauuugugcgcguuuccgg

SEQ ID NO: 43212 - RNA, 20 nt, Artificial Sequence
  spacer sequence TTCN PAM
ugaccagcucccgguagcgu

SEQ ID NO: 43213 - RNA, 20 nt, Artificial Sequence
  spacer sequence TTCN PAM
ugggcccacgcuaccgggag

SEQ ID NO: 43214 - RNA, 20 nt, Artificial Sequence
  spacer sequence TTCN PAM
uccccccccccccgcccucc

SEQ ID NO: 43215 - RNA, 20 nt, Artificial Sequence
  spacer sequence TTCN PAM
gggucugcgcgcacaguggc

SEQ ID NO: 43216 - RNA, 20 nt, Artificial Sequence
  spacer sequence TTCN PAM
ggcgaggguuggacgaccgc

SEQ ID NO: 43217 - RNA, 20 nt, Artificial Sequence
  spacer sequence TTCN PAM
ccgcggucguccaacccucg

SEQ ID NO: 43218 - RNA, 20 nt, Artificial Sequence
  spacer sequence TTCN PAM
ggccacguggucuggcggcc

SEQ ID NO: 43219 - RNA, 20 nt, Artificial Sequence
  spacer sequence TTCN PAM
gggcuccgcggggcuaccug

SEQ ID NO: 43220 - RNA, 20 nt, Artificial Sequence
  spacer sequence TTCN PAM
ggcacauacuaggcgcacaa

SEQ ID NO: 43221 - RNA, 20 nt, Artificial Sequence
  spacer sequence TTCN PAM
uuguaaauaacguucuggca

SEQ ID NO: 43222 - RNA, 20 nt, Artificial Sequence
  spacer sequence TTCN PAM
uucauuguaaauaacguucu

SEQ ID NO: 43223 - RNA, 20 nt, Artificial Sequence
  spacer sequence TTCN PAM
ccgcuggaccucaguuuccu

SEQ ID NO: 43224 - RNA, 20 nt, Artificial Sequence
  spacer sequence TTCN PAM
ccucugugugacucugagca

SEQ ID NO: 43225 - RNA, 20 nt, Artificial Sequence
  spacer sequence TTCN PAM
ugauucgcuguaggacuuug

SEQ ID NO: 43226 - RNA, 20 nt, Artificial Sequence
  spacer sequence TTCN PAM
cuguaggacuuuggucgagc

SEQ ID NO: 43227 - RNA, 20 nt, Artificial Sequence
  spacer sequence TTCN PAM
cugagccucagcguugcccg

SEQ ID NO: 43228 - RNA, 20 nt, Artificial Sequence
  spacer sequence TTCN PAM
gacagggccuccaagcaacg

SEQ ID NO: 43229 - RNA, 20 nt, Artificial Sequence
  spacer sequence TTCN PAM
guuugcgagccuggguuauu

SEQ ID NO: 43230 - RNA, 20 nt, Artificial Sequence
  spacer sequence TTCN PAM
ucauuccggcagcagagggu

SEQ ID NO: 43231 - RNA, 20 nt, Artificial Sequence
  spacer sequence TTCN PAM
ggcagcagaggguggccugg

SEQ ID NO: 43232 - RNA, 20 nt, Artificial Sequence
  spacer sequence TTCN PAM
ccgagcaaggagccaggcca

SEQ ID NO: 43233 - RNA, 20 nt, Artificial Sequence
  spacer sequence TTCN PAM
gccuccugcuuuccaccgca

SEQ ID NO: 43234 - RNA, 20 nt, Artificial Sequence
  spacer sequence TTCN PAM
accgcaccaggcucgcuugg

SEQ ID NO: 43235 - RNA, 20 nt, Artificial Sequence
  spacer sequence TTCN PAM
ccagucccugcuuccucugc

SEQ ID NO: 43236 - RNA, 20 nt, Artificial Sequence
  spacer sequence TTCN PAM
ucugcucucccacaacccgg

SEQ ID NO: 43237 - RNA, 20 nt, Artificial Sequence
  spacer sequence TTCN PAM
agccuccccccugcacaccg

SEQ ID NO: 43238 - RNA, 20 nt, Artificial Sequence
  spacer sequence TTCN PAM
gcccacaccggcccggugug

SEQ ID NO: 43239 - RNA, 20 nt, Artificial Sequence
  spacer sequence TTCN PAM
uucugcccacaccggcccgg

SEQ ID NO: 43240 - RNA, 20 nt, Artificial Sequence
  spacer sequence TTCN PAM
cagacaccgccauugcacuu

SEQ ID NO: 43241 - RNA, 20 nt, Artificial Sequence
  spacer sequence TTCN PAM
cccauauucaagaguugccu

SEQ ID NO: 43242 - RNA, 20 nt, Artificial Sequence
  spacer sequence TTCN PAM
agaguugccucccucaggaa

SEQ ID NO: 43243 - RNA, 20 nt, Artificial Sequence
  spacer sequence TTCN PAM
ugagggaggcaacucuugaa

SEQ ID NO: 43244 - RNA, 20 nt, Artificial Sequence
  spacer sequence TTCN PAM
ugcuguaaaggugccugugg

SEQ ID NO: 43245 - RNA, 20 nt, Artificial Sequence
  spacer sequence TTCN PAM
guucaugcuguaaaggugcc

SEQ ID NO: 43246 - RNA, 20 nt, Artificial Sequence
  spacer sequence TTCN PAM
uuaucacgaggccugcaagu

SEQ ID NO: 43247 - RNA, 20 nt, Artificial Sequence
  spacer sequence TTCN PAM
ucugcccagccuggccuguc

SEQ ID NO: 43248 - RNA, 20 nt, Artificial Sequence
  spacer sequence TTCN PAM
gcccagccuggccuguccuc

SEQ ID NO: 43249 - RNA, 20 nt, Artificial Sequence
  spacer sequence TTCN PAM
ggcucccacccugaguccuu

SEQ ID NO: 43250 - RNA, 20 nt, Artificial Sequence
  spacer sequence TTCN PAM
uucuuuuuuuuuuugagacg

SEQ ID NO: 43251 - RNA, 20 nt, Artificial Sequence
  spacer sequence TTCN PAM
uuuuuuuuuugagacggagu

SEQ ID NO: 43252 - RNA, 20 nt, Artificial Sequence
  spacer sequence TTCN PAM
cggguucaagcuucuccugc

SEQ ID NO: 43253 - RNA, 20 nt, Artificial Sequence
  spacer sequence TTCN PAM
agcuucuccugccucagccu

SEQ ID NO: 43254 - RNA, 20 nt, Artificial Sequence
  spacer sequence TTCN PAM
ccugccucagccucccaagu

SEQ ID NO: 43255 - RNA, 20 nt, Artificial Sequence
  spacer sequence TTCN PAM
agacaagccuggccaacaug

SEQ ID NO: 43256 - RNA, 20 nt, Artificial Sequence
  spacer sequence TTCN PAM
ugaccucaagugauccgccu

SEQ ID NO: 43257 - RNA, 20 nt, Artificial Sequence
  spacer sequence TTCN PAM
acaaacaaugcccagggccg

SEQ ID NO: 43258 - RNA, 20 nt, Artificial Sequence
  spacer sequence TTCN PAM
aguuggcuugggguuuuuga

SEQ ID NO: 43259 - RNA, 20 nt, Artificial Sequence
  spacer sequence TTCN PAM
ggugcucucugaucccaagc

SEQ ID NO: 43260 - RNA, 20 nt, Artificial Sequence
  spacer sequence TTCN PAM
cauugguggaaacuuaaaaa

SEQ ID NO: 43261 - RNA, 20 nt, Artificial Sequence
  spacer sequence TTCN PAM
accaaugggaagagucuuau

SEQ ID NO: 43262 - RNA, 20 nt, Artificial Sequence
  spacer sequence TTCN PAM
cuuaauagucucugugucag

SEQ ID NO: 43263 - RNA, 20 nt, Artificial Sequence
  spacer sequence TTCN PAM
uguccuuucucuuaauaguc

SEQ ID NO: 43264 - RNA, 20 nt, Artificial Sequence
  spacer sequence TTCN PAM
agcagcccuuguguuccugu

SEQ ID NO: 43265 - RNA, 20 nt, Artificial Sequence
  spacer sequence TTCN PAM
agaugccacaauguaagagu

SEQ ID NO: 43266 - RNA, 20 nt, Artificial Sequence
  spacer sequence TTCN PAM
ccaguggccgggcacggugg

SEQ ID NO: 43267 - RNA, 20 nt, Artificial Sequence
  spacer sequence TTCN PAM
ggguacgggugagccgggcg

SEQ ID NO: 43268 - RNA, 20 nt, Artificial Sequence
  spacer sequence TTCN PAM
gguuaaugccgcugagcccg

SEQ ID NO: 43269 - RNA, 20 nt, Artificial Sequence
  spacer sequence TTCN PAM
guggcaaaaggguuuguugc

SEQ ID NO: 43270 - RNA, 20 nt, Artificial Sequence
  spacer sequence TTCN PAM
agccacuuugaucacuuaag

SEQ ID NO: 43271 - RNA, 20 nt, Artificial Sequence
  spacer sequence TTCN PAM
gaggagcagccaagaucccc

SEQ ID NO: 43272 - RNA, 20 nt, Artificial Sequence
  spacer sequence TTCN PAM
ccagccagccaggaggcgaa

SEQ ID NO: 43273 - RNA, 20 nt, Artificial Sequence
  spacer sequence TTCN PAM
ccuccuggcuggcuggggaa

SEQ ID NO: 43274 - RNA, 20 nt, Artificial Sequence
  spacer sequence TTCN PAM
uggguccccuuuggaccugu

SEQ ID NO: 43275 - RNA, 20 nt, Artificial Sequence
  spacer sequence TTCN PAM
gcaggaccagggaguggggg

SEQ ID NO: 43276 - RNA, 20 nt, Artificial Sequence
  spacer sequence TTCN PAM
ccuucugcaggaccagggag

SEQ ID NO: 43277 - RNA, 20 nt, Artificial Sequence
  spacer sequence TTCN PAM
caccuggcccuggagaggaa

SEQ ID NO: 43278 - RNA, 20 nt, Artificial Sequence
  spacer sequence TTCN PAM
ucuccagggccaggugagaa

SEQ ID NO: 43279 - RNA, 20 nt, Artificial Sequence
  spacer sequence TTCN PAM
uccucuccagggccagguga

SEQ ID NO: 43280 - RNA, 20 nt, Artificial Sequence
  spacer sequence TTCN PAM
gcgcgggugccaccccuacc

SEQ ID NO: 43281 - RNA, 20 nt, Artificial Sequence
  spacer sequence TTCN PAM
cccuggaccacacccccucc

SEQ ID NO: 43282 - RNA, 20 nt, Artificial Sequence
  spacer sequence TTCN PAM
caaaugagagguuggcccuu

SEQ ID NO: 43283 - RNA, 20 nt, Artificial Sequence
  spacer sequence TTCN PAM
aucugcuuuguccccuagga

SEQ ID NO: 43284 - RNA, 20 nt, Artificial Sequence
  spacer sequence TTCN PAM
gggcugcucaugaggccugc

SEQ ID NO: 43285 - RNA, 20 nt, Artificial Sequence
  spacer sequence TTCN PAM
ucuucugagaaauggaccga

SEQ ID NO: 43286 - RNA, 20 nt, Artificial Sequence
  spacer sequence TTCN PAM
gagaaauggaccgagggcuc

SEQ ID NO: 43287 - RNA, 20 nt, Artificial Sequence
  spacer sequence TTCN PAM
cagaagaggaaacugaugcu

SEQ ID NO: 43288 - RNA, 20 nt, Artificial Sequence
  spacer sequence TTCN PAM
ccacgucccacacagccaga

SEQ ID NO: 43289 - RNA, 20 nt, Artificial Sequence
  spacer sequence TTCN PAM
aacagccucgguccuaggga

SEQ ID NO: 43290 - RNA, 20 nt, Artificial Sequence
  spacer sequence TTCN PAM
uuccugaagccccugacuca

SEQ ID NO: 43291 - RNA, 20 nt, Artificial Sequence
  spacer sequence TTCN PAM
ugaagccccugacucaggcc

SEQ ID NO: 43292 - RNA, 20 nt, Artificial Sequence
  spacer sequence TTCN PAM
ggaaugaagggggagcgagu

SEQ ID NO: 43293 - RNA, 20 nt, Artificial Sequence
  spacer sequence TTCN PAM
uucccgaccaaagcuagccu

SEQ ID NO: 43294 - RNA, 20 nt, Artificial Sequence
  spacer sequence TTCN PAM
cgaccaaagcuagccugggu

SEQ ID NO: 43295 - RNA, 20 nt, Artificial Sequence
  spacer sequence TTCN PAM
cagcgcgccuuuguccugcc

SEQ ID NO: 43296 - RNA, 20 nt, Artificial Sequence
  spacer sequence TTCN PAM
cccucguauuuauuuggagu

SEQ ID NO: 43297 - RNA, 20 nt, Artificial Sequence
  spacer sequence TTCN PAM
cuguucucucacuuuauacg

SEQ ID NO: 43298 - RNA, 20 nt, Artificial Sequence
  spacer sequence TTCN PAM
cucacuuuauacgcaucugg

SEQ ID NO: 43299 - RNA, 20 nt, Artificial Sequence
  spacer sequence TTCN PAM
cuggaccagaugcguauaaa

SEQ ID NO: 43300 - RNA, 20 nt, Artificial Sequence
  spacer sequence TTCN PAM
ccuaggacccagccucggca

SEQ ID NO: 43301 - RNA, 20 nt, Artificial Sequence
  spacer sequence TTCN PAM
gccccugccgaggcuggguc

SEQ ID NO: 43302 - RNA, 20 nt, Artificial Sequence
  spacer sequence TTCN PAM
ugcaugccugccuucugccc

SEQ ID NO: 43303 - RNA, 20 nt, Artificial Sequence
  spacer sequence TTCN PAM
accucccuggccaggacggg

SEQ ID NO: 43304 - RNA, 20 nt, Artificial Sequence
  spacer sequence TTCN PAM
ucaucugggaacggcuccga

SEQ ID NO: 43305 - RNA, 20 nt, Artificial Sequence
  spacer sequence TTCN PAM
cagaugaggaaacaggcugg

SEQ ID NO: 43306 - RNA, 20 nt, Artificial Sequence
  spacer sequence TTCN PAM
gccccaggaccugacuccuc

SEQ ID NO: 43307 - RNA, 20 nt, Artificial Sequence
  spacer sequence TTCN PAM
agcccagcggucugugacuu

SEQ ID NO: 43308 - RNA, 20 nt, Artificial Sequence
  spacer sequence TTCN PAM
cuggcugaguaacccgaggu

SEQ ID NO: 43309 - RNA, 20 nt, Artificial Sequence
  spacer sequence TTCN PAM
ggagccuuggccccuccggc

SEQ ID NO: 43310 - RNA, 20 nt, Artificial Sequence
  spacer sequence TTCN PAM
gcaggguggccgguguuguu

SEQ ID NO: 43311 - RNA, 20 nt, Artificial Sequence
  spacer sequence TTCN PAM
guuuggggacuuuuguuuuu

SEQ ID NO: 43312 - RNA, 20 nt, Artificial Sequence
  spacer sequence TTCN PAM
gacugaaagugcccuccccc

SEQ ID NO: 43313 - RNA, 20 nt, Artificial Sequence
  spacer sequence TTCN PAM
gucugaauuuaacccucccg

SEQ ID NO: 43314 - RNA, 20 nt, Artificial Sequence
  spacer sequence TTCN PAM
accccaaacgcugccacugg

SEQ ID NO: 43315 - RNA, 20 nt, Artificial Sequence
  spacer sequence TTCN PAM
gcuccccccccccccccaug

SEQ ID NO: 43316 - RNA, 20 nt, Artificial Sequence
  spacer sequence TTCN PAM
ggccugucuacagauguccu

SEQ ID NO: 43317 - RNA, 20 nt, Artificial Sequence
  spacer sequence TTCN PAM
ucuggccugucuacagaugu

SEQ ID NO: 43318 - RNA, 20 nt, Artificial Sequence
  spacer sequence TTCN PAM
ccaggaacccauaacacaug

SEQ ID NO: 43319 - RNA, 20 nt, Artificial Sequence
  spacer sequence TTCN PAM
uggagaagcccagggaccuu

SEQ ID NO: 43320 - RNA, 20 nt, Artificial Sequence
  spacer sequence TTCN PAM
agccucacugcaccugccug

SEQ ID NO: 43321 - RNA, 20 nt, Artificial Sequence
  spacer sequence TTCN PAM
ggcaggugcagugaggcugg

SEQ ID NO: 43322 - RNA, 20 nt, Artificial Sequence
  spacer sequence TTCN PAM
gaggaccagcacccucugag

SEQ ID NO: 43323 - RNA, 20 nt, Artificial Sequence
  spacer sequence TTCN PAM
cccagguggagaaugggccg

SEQ ID NO: 43324 - RNA, 20 nt, Artificial Sequence
  spacer sequence TTCN PAM
ccaccugggugaacggaggc

SEQ ID NO: 43325 - RNA, 20 nt, Artificial Sequence
  spacer sequence TTCN PAM
gagucuuaggugguuggauc

SEQ ID NO: 43326 - RNA, 20 nt, Artificial Sequence
  spacer sequence TTCN PAM
ucagagucuuaggugguugg

SEQ ID NO: 43327 - RNA, 20 nt, Artificial Sequence
  spacer sequence TTCN PAM
ugggccaccgagcagacagc

SEQ ID NO: 43328 - RNA, 20 nt, Artificial Sequence
  spacer sequence TTCN PAM
cacucaaucccaauccagcc

SEQ ID NO: 43329 - RNA, 20 nt, Artificial Sequence
  spacer sequence TTCN PAM
ggcagcuuaacuucagcacc

SEQ ID NO: 43330 - RNA, 20 nt, Artificial Sequence
  spacer sequence TTCN PAM
gcacccacgugugacuaauu

SEQ ID NO: 43331 - RNA, 20 nt, Artificial Sequence
  spacer sequence TTCN PAM
ugcccgcauccucugcccac

SEQ ID NO: 43332 - RNA, 20 nt, Artificial Sequence
  spacer sequence TTCN PAM
cggagggugguccgcucagc

SEQ ID NO: 43333 - RNA, 20 nt, Artificial Sequence
  spacer sequence TTCN PAM
uugaggaaggaucuuacucu

SEQ ID NO: 43334 - RNA, 20 nt, Artificial Sequence
  spacer sequence TTCN PAM
ucaaagaaguaaaggagggg

SEQ ID NO: 43335 - RNA, 20 nt, Artificial Sequence
  spacer sequence TTCN PAM
ugggcgauagaguaagaucc

SEQ ID NO: 43336 - RNA, 20 nt, Artificial Sequence
  spacer sequence TTCN PAM
ccuugccucagccucccaag

SEQ ID NO: 43337 - RNA, 20 nt, Artificial Sequence
  spacer sequence TTCN PAM
caaaaagacaaaacaaaacu

SEQ ID NO: 43338 - RNA, 20 nt, Artificial Sequence
  spacer sequence TTCN PAM
ugggcuggacuuggaacucc

SEQ ID NO: 43339 - RNA, 20 nt, Artificial Sequence
  spacer sequence TTCN PAM
aaguccagcccaggaaacau

SEQ ID NO: 43340 - RNA, 20 nt, Artificial Sequence
  spacer sequence TTCN PAM
agcacuuugggaggcugagg

SEQ ID NO: 43341 - RNA, 20 nt, Artificial Sequence
  spacer sequence TTCN PAM
caccugucauuccagcacuu

SEQ ID NO: 43342 - RNA, 20 nt, Artificial Sequence
  spacer sequence TTCN PAM
guaaaugggaggggggcugg

SEQ ID NO: 43343 - RNA, 20 nt, Artificial Sequence
  spacer sequence TTCN PAM
gaucuguaaaaugggccuga

SEQ ID NO: 43344 - RNA, 20 nt, Artificial Sequence
  spacer sequence TTCN PAM
ccaucuguaaagcaguaggc

SEQ ID NO: 43345 - RNA, 20 nt, Artificial Sequence
  spacer sequence TTCN PAM
acagccuacugcuuuacaga

SEQ ID NO: 43346 - RNA, 20 nt, Artificial Sequence
  spacer sequence TTCN PAM
gcgauggagccucagcuguu

SEQ ID NO: 43347 - RNA, 20 nt, Artificial Sequence
  spacer sequence TTCN PAM
gcaaacacucuccccugaaa

SEQ ID NO: 43348 - RNA, 20 nt, Artificial Sequence
  spacer sequence TTCN PAM
ggggagaguguuugcugaau

SEQ ID NO: 43349 - RNA, 20 nt, Artificial Sequence
  spacer sequence TTCN PAM
cgugaacuguggaggcaaag

SEQ ID NO: 43350 - RNA, 20 nt, Artificial Sequence
  spacer sequence TTCN PAM
cgggaagguuuucaggggag

SEQ ID NO: 43351 - RNA, 20 nt, Artificial Sequence
  spacer sequence TTCN PAM
gcauggugagccaggacccc

SEQ ID NO: 43352 - RNA, 20 nt, Artificial Sequence
  spacer sequence TTCN PAM
uucuccuggggccagggcgg

SEQ ID NO: 43353 - RNA, 20 nt, Artificial Sequence
  spacer sequence TTCN PAM
ccuggggccagggcgggcac

SEQ ID NO: 43354 - RNA, 20 nt, Artificial Sequence
  spacer sequence TTCN PAM
aggccugaggugcccgcccu

SEQ ID NO: 43355 - RNA, 20 nt, Artificial Sequence
  spacer sequence TTCN PAM
cccuguccaucuguccccac

SEQ ID NO: 43356 - RNA, 20 nt, Artificial Sequence
  spacer sequence TTCN PAM
ccccucccuguuucucccug

SEQ ID NO: 43357 - RNA, 20 nt, Artificial Sequence
  spacer sequence TTCN PAM
agcagagcccugggggcacg

SEQ ID NO: 43358 - RNA, 20 nt, Artificial Sequence
  spacer sequence TTCN PAM
cugcgccugcucccagggcu

SEQ ID NO: 43359 - RNA, 20 nt, Artificial Sequence
  spacer sequence TTCN PAM
agcuucccugcgccugcucc

SEQ ID NO: 43360 - RNA, 20 nt, Artificial Sequence
  spacer sequence TTCN PAM
agagucuaggucccugcaga

SEQ ID NO: 43361 - RNA, 20 nt, Artificial Sequence
  spacer sequence TTCN PAM
gacucccuguggucucuggg

SEQ ID NO: 43362 - RNA, 20 nt, Artificial Sequence
  spacer sequence TTCN PAM
cugggggaguuagggaguuu

SEQ ID NO: 43363 - RNA, 20 nt, Artificial Sequence
  spacer sequence TTCN PAM
ggcugcccugcgugcaguuu

SEQ ID NO: 43364 - RNA, 20 nt, Artificial Sequence
  spacer sequence TTCN PAM
ccaacucucucauuuccaac

SEQ ID NO: 43365 - RNA, 20 nt, Artificial Sequence
  spacer sequence TTCN PAM
aaccaaccccgggcuuccuc

SEQ ID NO: 43366 - RNA, 20 nt, Artificial Sequence
  spacer sequence TTCN PAM
ucugaggcccccuacccccg

SEQ ID NO: 43367 - RNA, 20 nt, Artificial Sequence
  spacer sequence TTCN PAM
cggggguagggggccucaga

SEQ ID NO: 43368 - RNA, 20 nt, Artificial Sequence
  spacer sequence TTCN PAM
ucccuuucccggggguaggg

SEQ ID NO: 43369 - RNA, 20 nt, Artificial Sequence
  spacer sequence TTCN PAM
cucggggcgggguaggaucg

SEQ ID NO: 43370 - RNA, 20 nt, Artificial Sequence
  spacer sequence TTCN PAM
ccccucccccagcagauggc

SEQ ID NO: 43371 - RNA, 20 nt, Artificial Sequence
  spacer sequence TTCN PAM
acgggcugugccaucugcug

SEQ ID NO: 43372 - RNA, 20 nt, Artificial Sequence
  spacer sequence TTCN PAM
acaugaaggaaauccacaag

SEQ ID NO: 43373 - RNA, 20 nt, Artificial Sequence
  spacer sequence TTCN PAM
uguugaauuugggggcgacc

SEQ ID NO: 43374 - RNA, 20 nt, Artificial Sequence
  spacer sequence TTCN PAM
uucauguugaauuugggggc

SEQ ID NO: 43375 - RNA, 20 nt, Artificial Sequence
  spacer sequence TTCN PAM
gacuuguggauuuccuucau

SEQ ID NO: 43376 - RNA, 20 nt, Artificial Sequence
  spacer sequence TTCN PAM
ugguuuucugacuuguggau

SEQ ID NO: 43377 - RNA, 20 nt, Artificial Sequence
  spacer sequence TTCN PAM
agacuuaaagugccgggggu

SEQ ID NO: 43378 - RNA, 20 nt, Artificial Sequence
  spacer sequence TTCN PAM
uccacccucaaucucccucc

SEQ ID NO: 43379 - RNA, 20 nt, Artificial Sequence
  spacer sequence TTCN PAM
uggggggagggagauugagg

SEQ ID NO: 43380 - RNA, 20 nt, Artificial Sequence
  spacer sequence TTCN PAM
ggaaagaaaaaaaaaacagc

SEQ ID NO: 43381 - RNA, 20 nt, Artificial Sequence
  spacer sequence TTCN PAM
ugaauacuguugggguuuuc

SEQ ID NO: 43382 - RNA, 20 nt, Artificial Sequence
  spacer sequence TTCN PAM
uuccugaauacuguuggggu

SEQ ID NO: 43383 - RNA, 20 nt, Artificial Sequence
  spacer sequence TTCN PAM
cggauacaucgcgacaguaa

SEQ ID NO: 43384 - RNA, 20 nt, Artificial Sequence
  spacer sequence TTCN PAM
aagaugggggaugggggauc

SEQ ID NO: 43385 - RNA, 20 nt, Artificial Sequence
  spacer sequence TTCN PAM
acccccagaaaaagguacag

SEQ ID NO: 43386 - RNA, 20 nt, Artificial Sequence
  spacer sequence TTCN PAM
ggggguggaaugggucuugg

SEQ ID NO: 43387 - RNA, 20 nt, Artificial Sequence
  spacer sequence TTCN PAM
cuguaccuuuuucugggggu

SEQ ID NO: 43388 - RNA, 20 nt, Artificial Sequence
  spacer sequence TTCN PAM
auuccaaagaaaugcacucc

SEQ ID NO: 43389 - RNA, 20 nt, Artificial Sequence
  spacer sequence TTCN PAM
aaagaaaugcacuccaggcc

SEQ ID NO: 43390 - RNA, 20 nt, Artificial Sequence
  spacer sequence TTCN PAM
uuggaauggaaauuuuucuc

SEQ ID NO: 43391 - RNA, 20 nt, Artificial Sequence
  spacer sequence TTCN PAM
ccagggguccccaggugggg

SEQ ID NO: 43392 - RNA, 20 nt, Artificial Sequence
  spacer sequence TTCN PAM
gaagcagagaaauccccucu

SEQ ID NO: 43393 - RNA, 20 nt, Artificial Sequence
  spacer sequence TTCN PAM
gaaguugggucucccucgac

SEQ ID NO: 43394 - RNA, 20 nt, Artificial Sequence
  spacer sequence TTCN PAM
cugcuucugaaguugggucu

SEQ ID NO: 43395 - RNA, 20 nt, Artificial Sequence
  spacer sequence TTCN PAM
cacccggccuccaguuggca

SEQ ID NO: 43396 - RNA, 20 nt, Artificial Sequence
  spacer sequence TTCN PAM
uuuuuggagggcgugugaaa

SEQ ID NO: 43397 - RNA, 20 nt, Artificial Sequence
  spacer sequence TTCN PAM
cacgcccuccaaaaaagaaa

SEQ ID NO: 43398 - RNA, 20 nt, Artificial Sequence
  spacer sequence TTCN PAM
uaguccucaaaaaaagucag

SEQ ID NO: 43399 - RNA, 20 nt, Artificial Sequence
  spacer sequence TTCN PAM
gcuaccccacaaaaaagugc

SEQ ID NO: 43400 - RNA, 20 nt, Artificial Sequence
  spacer sequence TTCN PAM
acgggagcuggaagacuucu

SEQ ID NO: 43401 - RNA, 20 nt, Artificial Sequence
  spacer sequence TTCN PAM
agcucccguagaaugcccgu

SEQ ID NO: 43402 - RNA, 20 nt, Artificial Sequence
  spacer sequence TTCN PAM
ggggcgucccaaggacuuug

SEQ ID NO: 43403 - RNA, 20 nt, Artificial Sequence
  spacer sequence TTCN PAM
ccaagucucucaaaguccuu

SEQ ID NO: 43404 - RNA, 20 nt, Artificial Sequence
  spacer sequence TTCN PAM
aacauucuccaagucucuca

SEQ ID NO: 43405 - RNA, 20 nt, Artificial Sequence
  spacer sequence TTCN PAM
gcgccgugcaaaguggcuuc

SEQ ID NO: 43406 - RNA, 20 nt, Artificial Sequence
  spacer sequence TTCN PAM
agcgcgccccccgccuucgg

SEQ ID NO: 43407 - RNA, 20 nt, Artificial Sequence
  spacer sequence TTCN PAM
cggggggaggcggcccggga

SEQ ID NO: 43408 - RNA, 20 nt, Artificial Sequence
  spacer sequence TTCN PAM
cgggccgccuccccccggga

SEQ ID NO: 43409 - RNA, 20 nt, Artificial Sequence
  spacer sequence TTCN PAM
aaggcucccgggccgcaccg

SEQ ID NO: 43410 - RNA, 20 nt, Artificial Sequence
  spacer sequence TTCN PAM
ccgcgcagacaaaaggacgu

SEQ ID NO: 43411 - RNA, 20 nt, Artificial Sequence
  spacer sequence TTCN PAM
cggguagaggggggcccggc

SEQ ID NO: 43412 - RNA, 20 nt, Artificial Sequence
  spacer sequence TTCN PAM
cgaagugcccggcccgacgg

SEQ ID NO: 43413 - RNA, 20 nt, Artificial Sequence
  spacer sequence TTCN PAM
ggaaacuuuaagcagccccg

SEQ ID NO: 43414 - RNA, 20 nt, Artificial Sequence
  spacer sequence TTCN PAM
cgcggcgccgggggggcggc

SEQ ID NO: 43415 - RNA, 20 nt, Artificial Sequence
  spacer sequence TTCN PAM
ccaacuucgcgcggcgccgg

SEQ ID NO: 43416 - RNA, 20 nt, Artificial Sequence
  spacer sequence TTCN PAM
uccgcgcccccccccaacaa

SEQ ID NO: 43417 - RNA, 20 nt, Artificial Sequence
  spacer sequence TTCN PAM
cugggcacaaagcacggggg

SEQ ID NO: 43418 - RNA, 20 nt, Artificial Sequence
  spacer sequence TTCN PAM
ugccgccgcccccccccacg

SEQ ID NO: 43419 - RNA, 20 nt, Artificial Sequence
  spacer sequence TTCN PAM
ugcggcgggagacauguucc

SEQ ID NO: 43420 - RNA, 20 nt, Artificial Sequence
  spacer sequence TTCN PAM
gccccccgcccgcgccgccc

SEQ ID NO: 43421 - RNA, 20 nt, Artificial Sequence
  spacer sequence TTCN PAM
ggcccgagccgcccggaggu

SEQ ID NO: 43422 - RNA, 20 nt, Artificial Sequence
  spacer sequence TTCN PAM
ggguccucacgagggugcuc

SEQ ID NO: 43423 - RNA, 20 nt, Artificial Sequence
  spacer sequence TTCN PAM
ccccgcgccguggcccgacc

SEQ ID NO: 43424 - RNA, 20 nt, Artificial Sequence
  spacer sequence TTCN PAM
gcggacggggauaguccgug

SEQ ID NO: 43425 - RNA, 20 nt, Artificial Sequence
  spacer sequence TTCN PAM
aucucacgggccuuacucgc

SEQ ID NO: 43426 - RNA, 20 nt, Artificial Sequence
  spacer sequence TTCN PAM
gauugaccagacugcucugc

SEQ ID NO: 43427 - RNA, 20 nt, Artificial Sequence
  spacer sequence TTCN PAM
cggcuuccgauugaccagac

SEQ ID NO: 43428 - RNA, 20 nt, Artificial Sequence
  spacer sequence TTCN PAM
uggugaggccccgccuccuu

SEQ ID NO: 43429 - RNA, 20 nt, Artificial Sequence
  spacer sequence TTCN PAM
ucucggccccgccccucagc

SEQ ID NO: 43430 - RNA, 20 nt, Artificial Sequence
  spacer sequence TTCN PAM
cggccccgccccucagcaga

SEQ ID NO: 43431 - RNA, 20 nt, Artificial Sequence
  spacer sequence TTCN PAM
cagguuggcguggccgcccg

SEQ ID NO: 43432 - RNA, 20 nt, Artificial Sequence
  spacer sequence TTCN PAM
gcuugguuauauuugcguuc

SEQ ID NO: 43433 - RNA, 20 nt, Artificial Sequence
  spacer sequence TTCN PAM
ucgggccggccccgcgugcu

SEQ ID NO: 43434 - RNA, 20 nt, Artificial Sequence
  spacer sequence TTCN PAM
cggcgggaaaaccgacucug

SEQ ID NO: 43435 - RNA, 20 nt, Artificial Sequence
  spacer sequence TTCN PAM
cgccgggaaaaugggucuga

SEQ ID NO: 43436 - RNA, 20 nt, Artificial Sequence
  spacer sequence TTCN PAM
cagaugccgagacggagacu

SEQ ID NO: 43437 - RNA, 20 nt, Artificial Sequence
  spacer sequence TTCN PAM
guccaaagucagguccaaau

SEQ ID NO: 43438 - RNA, 20 nt, Artificial Sequence
  spacer sequence TTCN PAM
ugauucuuaguaguccgugu

SEQ ID NO: 43439 - RNA, 20 nt, Artificial Sequence
  spacer sequence TTCN PAM
uaguaguccgugucuacauu

SEQ ID NO: 43440 - RNA, 20 nt, Artificial Sequence
  spacer sequence TTCN PAM
aagcgcugggaucacaggca

SEQ ID NO: 43441 - RNA, 20 nt, Artificial Sequence
  spacer sequence TTCN PAM
cgccucggccuccuucaaag

SEQ ID NO: 43442 - RNA, 20 nt, Artificial Sequence
  spacer sequence TTCN PAM
agaacagccugaacaacaua

SEQ ID NO: 43443 - RNA, 20 nt, Artificial Sequence
  spacer sequence TTCN PAM
cgaacuccuggccucaagcg

SEQ ID NO: 43444 - RNA, 20 nt, Artificial Sequence
  spacer sequence TTCN PAM
ggcuguucucgaacuccugg

SEQ ID NO: 43445 - RNA, 20 nt, Artificial Sequence
  spacer sequence TTCN PAM
cuauguuguucaggcuguuc

SEQ ID NO: 43446 - RNA, 20 nt, Artificial Sequence
  spacer sequence TTCN PAM
cagcacuuugggaggccaag

SEQ ID NO: 43447 - RNA, 20 nt, Artificial Sequence
  spacer sequence TTCN PAM
ggugaucugcccgccuuggc

SEQ ID NO: 43448 - RNA, 20 nt, Artificial Sequence
  spacer sequence TTCN PAM
agaccucucuggccaacacg

SEQ ID NO: 43449 - RNA, 20 nt, Artificial Sequence
  spacer sequence TTCN PAM
ccguguuggccagagagguc

SEQ ID NO: 43450 - RNA, 20 nt, Artificial Sequence
  spacer sequence TTCN PAM
gcugccucagccucccgagu

SEQ ID NO: 43451 - RNA, 20 nt, Artificial Sequence
  spacer sequence TTCN PAM
cccgaaaggcggagguugca

SEQ ID NO: 43452 - RNA, 20 nt, Artificial Sequence
  spacer sequence TTCN PAM
ggugaaagcgauucugcugc

SEQ ID NO: 43453 - RNA, 20 nt, Artificial Sequence
  spacer sequence TTCN PAM
uccuuguugcccaggcugga

SEQ ID NO: 43454 - RNA, 20 nt, Artificial Sequence
  spacer sequence TTCN PAM
cgaguagcugagauuauagg

SEQ ID NO: 43455 - RNA, 20 nt, Artificial Sequence
  spacer sequence TTCN PAM
ccugccucagcuucccgagu

SEQ ID NO: 43456 - RNA, 20 nt, Artificial Sequence
  spacer sequence TTCN PAM
gucgcccagccuggagugca

SEQ ID NO: 43457 - RNA, 20 nt, Artificial Sequence
  spacer sequence TTCN PAM
uuuauuuguuuaguuauuuu

SEQ ID NO: 43458 - RNA, 20 nt, Artificial Sequence
  spacer sequence TTCN PAM
cuuuggggccccagggagcc

SEQ ID NO: 43459 - RNA, 20 nt, Artificial Sequence
  spacer sequence TTCN PAM
caggcugggaguggagugua

SEQ ID NO: 43460 - RNA, 20 nt, Artificial Sequence
  spacer sequence TTCN PAM
ggaccauccagagggcagga

SEQ ID NO: 43461 - RNA, 20 nt, Artificial Sequence
  spacer sequence TTCN PAM
caccccuaucuggagccccu

SEQ ID NO: 43462 - RNA, 20 nt, Artificial Sequence
  spacer sequence TTCN PAM
augcugcaccuaugccaggc

SEQ ID NO: 43463 - RNA, 20 nt, Artificial Sequence
  spacer sequence TTCN PAM
acgugccgcaggucugggga

SEQ ID NO: 43464 - RNA, 20 nt, Artificial Sequence
  spacer sequence TTCN PAM
ugcuacucuccgggccucgg

SEQ ID NO: 43465 - RNA, 20 nt, Artificial Sequence
  spacer sequence TTCN PAM
ccaucuggacaguggaaggg

SEQ ID NO: 43466 - RNA, 20 nt, Artificial Sequence
  spacer sequence TTCN PAM
acuguccagauggagaaacc

SEQ ID NO: 43467 - RNA, 20 nt, Artificial Sequence
  spacer sequence TTCN PAM
ccauguuagccaggaugguc

SEQ ID NO: 43468 - RNA, 20 nt, Artificial Sequence
  spacer sequence TTCN PAM
cccugugaccucagggucug

SEQ ID NO: 43469 - RNA, 20 nt, Artificial Sequence
  spacer sequence TTCN PAM
uccccacucucaggccccuu

SEQ ID NO: 43470 - RNA, 20 nt, Artificial Sequence
  spacer sequence TTCN PAM
ucccacucucaggccccugu

SEQ ID NO: 43471 - RNA, 20 nt, Artificial Sequence
  spacer sequence TTCN PAM
cccccuugcgccuguggggc

SEQ ID NO: 43472 - RNA, 20 nt, Artificial Sequence
  spacer sequence TTCN PAM
ccaucuuacaggugaggaaa

SEQ ID NO: 43473 - RNA, 20 nt, Artificial Sequence
  spacer sequence TTCN PAM
ucaccuguaagauggggaac

SEQ ID NO: 43474 - RNA, 20 nt, Artificial Sequence
  spacer sequence TTCN PAM
gagccucaguuuccucaccu

SEQ ID NO: 43475 - RNA, 20 nt, Artificial Sequence
  spacer sequence TTCN PAM
ccugggccggggcucccaga

SEQ ID NO: 43476 - RNA, 20 nt, Artificial Sequence
  spacer sequence TTCN PAM
uccuggcccagggcgccgug

SEQ ID NO: 43477 - RNA, 20 nt, Artificial Sequence
  spacer sequence TTCN PAM
gagucccccucagccuuucu

SEQ ID NO: 43478 - RNA, 20 nt, Artificial Sequence
  spacer sequence TTCN PAM
cgguuggucuccaucucugu

SEQ ID NO: 43479 - RNA, 20 nt, Artificial Sequence
  spacer sequence TTCN PAM
gucuguuucucucugucuuc

SEQ ID NO: 43480 - RNA, 20 nt, Artificial Sequence
  spacer sequence TTCN PAM
cucugucuucuuucucugug

SEQ ID NO: 43481 - RNA, 20 nt, Artificial Sequence
  spacer sequence TTCN PAM
uucucugugcucucucugug

SEQ ID NO: 43482 - RNA, 20 nt, Artificial Sequence
  spacer sequence TTCN PAM
cugugcucucucugugucag

SEQ ID NO: 43483 - RNA, 20 nt, Artificial Sequence
  spacer sequence TTCN PAM
cuuccccaucucugucuguc

SEQ ID NO: 43484 - RNA, 20 nt, Artificial Sequence
  spacer sequence TTCN PAM
ccaucucugucugucuuuuu

SEQ ID NO: 43485 - RNA, 20 nt, Artificial Sequence
  spacer sequence TTCN PAM
uucugucucugcguaucucu

SEQ ID NO: 43486 - RNA, 20 nt, Artificial Sequence
  spacer sequence TTCN PAM
gucucugcguaucucuuucu

SEQ ID NO: 43487 - RNA, 20 nt, Artificial Sequence
  spacer sequence TTCN PAM
gucccucugucucugucagu

SEQ ID NO: 43488 - RNA, 20 nt, Artificial Sequence
  spacer sequence TTCN PAM
cuuuaucucuuucugucucu

SEQ ID NO: 43489 - RNA, 20 nt, Artificial Sequence
  spacer sequence TTCN PAM
gucucucucugccugucucu

SEQ ID NO: 43490 - RNA, 20 nt, Artificial Sequence
  spacer sequence TTCN PAM
cugccugucucucucucugc

SEQ ID NO: 43491 - RNA, 20 nt, Artificial Sequence
  spacer sequence TTCN PAM
guucuucucugucuccuucu

SEQ ID NO: 43492 - RNA, 20 nt, Artificial Sequence
  spacer sequence TTCN PAM
ucucugucuccuucucugcu

SEQ ID NO: 43493 - RNA, 20 nt, Artificial Sequence
  spacer sequence TTCN PAM
cugucuccuucucugcuucu

SEQ ID NO: 43494 - RNA, 20 nt, Artificial Sequence
  spacer sequence TTCN PAM
cugcuucucugucuccuucu

SEQ ID NO: 43495 - RNA, 20 nt, Artificial Sequence
  spacer sequence TTCN PAM
cugucuccuucucuuucugu

SEQ ID NO: 43496 - RNA, 20 nt, Artificial Sequence
  spacer sequence TTCN PAM
cuuucuguuccuaucucuug

SEQ ID NO: 43497 - RNA, 20 nt, Artificial Sequence
  spacer sequence TTCN PAM
guuccuaucucuugucuuuu

SEQ ID NO: 43498 - RNA, 20 nt, Artificial Sequence
  spacer sequence TTCN PAM
uaucucuugucuuuuucucu

SEQ ID NO: 43499 - RNA, 20 nt, Artificial Sequence
  spacer sequence TTCN PAM
cugucucucucugccucucu

SEQ ID NO: 43500 - RNA, 20 nt, Artificial Sequence
  spacer sequence TTCN PAM
ccuucacacuggggacuccc

SEQ ID NO: 43501 - RNA, 20 nt, Artificial Sequence
  spacer sequence TTCN PAM
cacuggggacuccccugacu

SEQ ID NO: 43502 - RNA, 20 nt, Artificial Sequence
  spacer sequence TTCN PAM
agaccucccgcuccacccca

SEQ ID NO: 43503 - RNA, 20 nt, Artificial Sequence
  spacer sequence TTCN PAM
ugccagcacagaggugcugg

SEQ ID NO: 43504 - RNA, 20 nt, Artificial Sequence
  spacer sequence TTCN PAM
ccacaugcaggguguuugca

SEQ ID NO: 43505 - RNA, 20 nt, Artificial Sequence
  spacer sequence TTCN PAM
ccagagcaccgcucugagag

SEQ ID NO: 43506 - RNA, 20 nt, Artificial Sequence
  spacer sequence TTCN PAM
ccaucuggcugggagccccg

SEQ ID NO: 43507 - RNA, 20 nt, Artificial Sequence
  spacer sequence TTCN PAM
ccuuccccaucuggcuggga

SEQ ID NO: 43508 - RNA, 20 nt, Artificial Sequence
  spacer sequence TTCN PAM
aaggaaucgccuuacaggca

SEQ ID NO: 43509 - RNA, 20 nt, Artificial Sequence
  spacer sequence TTCN PAM
aaauucuccuuccccaucug

SEQ ID NO: 43510 - RNA, 20 nt, Artificial Sequence
  spacer sequence TTCN PAM
uucgaaauucuccuucccca

SEQ ID NO: 43511 - RNA, 20 nt, Artificial Sequence
  spacer sequence TTCN PAM
aaugccuguaaggcgauucc

SEQ ID NO: 43512 - RNA, 20 nt, Artificial Sequence
  spacer sequence TTCN PAM
ccuggccucugccugcagag

SEQ ID NO: 43513 - RNA, 20 nt, Artificial Sequence
  spacer sequence TTCN PAM
cugugugacgggggagugug

SEQ ID NO: 43514 - RNA, 20 nt, Artificial Sequence
  spacer sequence TTCN PAM
gggaucuacaccccugaucc

SEQ ID NO: 43515 - RNA, 20 nt, Artificial Sequence
  spacer sequence TTCN PAM
auugucugcgaggguggugg

SEQ ID NO: 43516 - RNA, 20 nt, Artificial Sequence
  spacer sequence TTCN PAM
ucacuguagaaacauccucu

SEQ ID NO: 43517 - RNA, 20 nt, Artificial Sequence
  spacer sequence TTCN PAM
acagugaugaauucuauugu

SEQ ID NO: 43518 - RNA, 20 nt, Artificial Sequence
  spacer sequence TTCN PAM
ugauuugcauuuuugcauau

SEQ ID NO: 43519 - RNA, 20 nt, Artificial Sequence
  spacer sequence TTCN PAM
gagcuacugcaccuuuaaaa

SEQ ID NO: 43520 - RNA, 20 nt, Artificial Sequence
  spacer sequence TTCN PAM
ucaccuggccuggggggugc

SEQ ID NO: 43521 - RNA, 20 nt, Artificial Sequence
  spacer sequence TTCN PAM
ugugagccccagaggcaggg

SEQ ID NO: 43522 - RNA, 20 nt, Artificial Sequence
  spacer sequence TTCN PAM
gucucucugugucucucucu

SEQ ID NO: 43523 - RNA, 20 nt, Artificial Sequence
  spacer sequence TTCN PAM
cuauuucacucucugccucu

SEQ ID NO: 43524 - RNA, 20 nt, Artificial Sequence
  spacer sequence TTCN PAM
cucucugccucucucugucu

SEQ ID NO: 43525 - RNA, 20 nt, Artificial Sequence
  spacer sequence TTCN PAM
gucucuuucucugucucucu

SEQ ID NO: 43526 - RNA, 20 nt, Artificial Sequence
  spacer sequence TTCN PAM
cugucucucugugucucucu

SEQ ID NO: 43527 - RNA, 20 nt, Artificial Sequence
  spacer sequence TTCN PAM
cucugucucugugucugucu

SEQ ID NO: 43528 - RNA, 20 nt, Artificial Sequence
  spacer sequence TTCN PAM
cugucucucugucucccucu

SEQ ID NO: 43529 - RNA, 20 nt, Artificial Sequence
  spacer sequence TTCN PAM
gugauggagaggggggagca

SEQ ID NO: 43530 - RNA, 20 nt, Artificial Sequence
  spacer sequence TTCN PAM
gggggagaucucagguccug

SEQ ID NO: 43531 - RNA, 20 nt, Artificial Sequence
  spacer sequence TTCN PAM
aguuugaaccuuccccacac

SEQ ID NO: 43532 - RNA, 20 nt, Artificial Sequence
  spacer sequence TTCN PAM
aacuugaacaaaggcugggu

SEQ ID NO: 43533 - RNA, 20 nt, Artificial Sequence
  spacer sequence TTCN PAM
ccacacaucagaggcuucag

SEQ ID NO: 43534 - RNA, 20 nt, Artificial Sequence
  spacer sequence TTCN PAM
gauuuccccggagaauccga

SEQ ID NO: 43535 - RNA, 20 nt, Artificial Sequence
  spacer sequence TTCN PAM
ccggagaauccgauuugggc

SEQ ID NO: 43536 - RNA, 20 nt, Artificial Sequence
  spacer sequence TTCN PAM
ccggggaaaucugaagccuc

SEQ ID NO: 43537 - RNA, 20 nt, Artificial Sequence
  spacer sequence TTCN PAM
gggcgggucccggccccaca

SEQ ID NO: 43538 - RNA, 20 nt, Artificial Sequence
  spacer sequence TTCN PAM
cgccauggcccacuuccugg

SEQ ID NO: 43539 - RNA, 20 nt, Artificial Sequence
  spacer sequence TTCN PAM
uggcacggguugguuggccc

SEQ ID NO: 43540 - RNA, 20 nt, Artificial Sequence
  spacer sequence TTCN PAM
ucugcccacuggcgagggac

SEQ ID NO: 43541 - RNA, 20 nt, Artificial Sequence
  spacer sequence TTCN PAM
ccagccccccggccggaauc

SEQ ID NO: 43542 - RNA, 20 nt, Artificial Sequence
  spacer sequence TTCN PAM
ggccggggggcuggggaaag

SEQ ID NO: 43543 - RNA, 20 nt, Artificial Sequence
  spacer sequence TTCN PAM
accaccugaggcuguggauu

SEQ ID NO: 43544 - RNA, 20 nt, Artificial Sequence
  spacer sequence TTCN PAM
ucaaacucacccccacuuug

SEQ ID NO: 43545 - RNA, 20 nt, Artificial Sequence
  spacer sequence TTCN PAM
uggagacaggcaagggcccc

SEQ ID NO: 43546 - RNA, 20 nt, Artificial Sequence
  spacer sequence TTCN PAM
uguacugcaagugucuuggc

SEQ ID NO: 43547 - RNA, 20 nt, Artificial Sequence
  spacer sequence TTCN PAM
uaguucuuguacugcaagug

SEQ ID NO: 43548 - RNA, 20 nt, Artificial Sequence
  spacer sequence TTCN PAM
agaccagucuguucaagacc

SEQ ID NO: 43549 - RNA, 20 nt, Artificial Sequence
  spacer sequence TTCN PAM
agaccaaccuggccaacacg

SEQ ID NO: 43550 - RNA, 20 nt, Artificial Sequence
  spacer sequence TTCN PAM
ccguguuggccagguugguc

SEQ ID NO: 43551 - RNA, 20 nt, Artificial Sequence
  spacer sequence TTCN PAM
agcuacucagaaggcugagg

SEQ ID NO: 43552 - RNA, 20 nt, Artificial Sequence
  spacer sequence TTCN PAM
gaguagcuggaauuacaggu

SEQ ID NO: 43553 - RNA, 20 nt, Artificial Sequence
  spacer sequence TTCN PAM
ccugccucagccuucugagu

SEQ ID NO: 43554 - RNA, 20 nt, Artificial Sequence
  spacer sequence TTCN PAM
agcgauucuccugccucagc

SEQ ID NO: 43555 - RNA, 20 nt, Artificial Sequence
  spacer sequence TTCN PAM
guuuuuuuuuuuuuuuugag

SEQ ID NO: 43556 - RNA, 20 nt, Artificial Sequence
  spacer sequence TTCN PAM
uaguuauuuuguuuguuuuc

SEQ ID NO: 43557 - RNA, 20 nt, Artificial Sequence
  spacer sequence TTCN PAM
ugaagggacucacagccaag

SEQ ID NO: 43558 - RNA, 20 nt, Artificial Sequence
  spacer sequence TTCN PAM
ggaaggcuggcuuaugugug

SEQ ID NO: 43559 - RNA, 20 nt, Artificial Sequence
  spacer sequence TTCN PAM
auugccccccuccugugcaa

SEQ ID NO: 43560 - RNA, 20 nt, Artificial Sequence
  spacer sequence TTCN PAM
aagaugaccgugucggcgcc

SEQ ID NO: 43561 - RNA, 20 nt, Artificial Sequence
  spacer sequence TTCN PAM
aacgcuugcacaggaggggg

SEQ ID NO: 43562 - RNA, 20 nt, Artificial Sequence
  spacer sequence TTCN PAM
aacugugggggaacaggccc

SEQ ID NO: 43563 - RNA, 20 nt, Artificial Sequence
  spacer sequence TTCN PAM
aaagccagagggcgccaucu

SEQ ID NO: 43564 - RNA, 20 nt, Artificial Sequence
  spacer sequence TTCN PAM
cccacaguucgaaagccaga

SEQ ID NO: 43565 - RNA, 20 nt, Artificial Sequence
  spacer sequence TTCN PAM
acagcacgcgcaaacggaug

SEQ ID NO: 43566 - RNA, 20 nt, Artificial Sequence
  spacer sequence TTCN PAM
ucccccagcuccaugaucgu

SEQ ID NO: 43567 - RNA, 20 nt, Artificial Sequence
  spacer sequence TTCN PAM
ugucccgcacccaggacacc

SEQ ID NO: 43568 - RNA, 20 nt, Artificial Sequence
  spacer sequence TTCN PAM
gcuacguguuccugucccgc

SEQ ID NO: 43569 - RNA, 20 nt, Artificial Sequence
  spacer sequence TTCN PAM
gggcugcggugaccagcgcc

SEQ ID NO: 43570 - protein, 50 aa, Artificial Sequence
  peptide transduction domain
  SITE (4)..(50): individual amino acid residues may be present or absent
RRRRRRRRRRRRRRRRRRRRRRRRRRRRRRRRRRRRRRRRRRRRRRRRRR

SEQ ID NO: 43571 - RNA, 97 nt, Artificial Sequence
  gNA Variant Scaffold
acuggcacuuuuaucugauuacuuugagagccaucaccagcgacuaugucguauggguaaagcgcuuacggacuucgguccguaagaagcaucaaag

SEQ ID NO: 43572 - RNA, 97 nt, Artificial Sequence
  gNA Variant Scaffold
acuggcacuucuaucugauuacucugagagccaucaccagcgacuaugucguauggguaaagcgcuuacggacuucgguccguaagaagcaucagag

SEQ ID NO: 43573 - RNA, 98 nt, Artificial Sequence
  gNA Variant Scaffold
acuggcgcuucuaucugauuacucugagagccaucaccagcgacuaugucguauggguaaagccgcuuacggacuucgguccguaagaggcaucagag

SEQ ID NO: 43574 - RNA, 98 nt, Artificial Sequence
  gNA Variant Scaffold
acuggcacuucuaucugauuacucugagcgccaucaccagcgacuaugucguauggguaaagccgcuuacggacuucgguccguaagaggcaucagag

SEQ ID NO: 43575 - RNA, 98 nt, Artificial Sequence
  gNA Variant Scaffold
acuggcgcuucuaucugauuacucugagcgccaucaccagcgacuaugucguauggguaaagccgcuuacggacuucgguccguaagaggcaucagag

SEQ ID NO: 43576 - RNA, 98 nt, Artificial Sequence
  gNA Variant Scaffold
acuggcgcuucuaucugauuacucugagcgccaucaccagcgacuaugucguauggguaaagcgccuuacggacuucgguccguaaggagcaucagag

SEQ ID NO: 43577 - RNA, 99 nt, Artificial Sequence
  gNA Variant Scaffold
acuggcgcuucuaucugauuacucugagcgccaucaccagcgacuaugucguaguggguaaagccgcuuacggacuucgguccguaagaggcaucagag

SEQ ID NO: 43578 - RNA, 98 nt, Artificial Sequence
  gNA Variant Scaffold
acgggacuuucuaucugauuacucugaagucccucaccagcgacuaugucguauggguaaagccgcuuacggacuucgguccguaagaggcaucagag

SEQ ID NO: 43579 - RNA, 98 nt, Artificial Sequence
  gNA Variant Scaffold
accuguaguucuaucugauuacucugacuacagucaccagcgacuaugucguauggguaaagccgcuuacggacuucgguccguaagaggcaucagag

SEQ ID NO: 43580 - RNA, 113 nt, Artificial Sequence
  gNA Variant Scaffold
acuggcgcuuuuaucugauuacuuugagagccaucaccagcgacuaugucguaguggguaaagcugcacggugggcgcagcuucggcugacgguacaccgugcagcaucaaag

SEQ ID NO: 43581 - RNA, 143 nt, Artificial Sequence
  gNA Variant Scaffold
acuggcgcuuuuaucugauuacuuugagagccaucaccagcgacuaugucguaguggguaaagcugcacggugggcgcagcuucggcugacgguacaccggugggcgcagcuucggcugacgguacaccgugcagcaucaaag

SEQ ID NO: 43582 - RNA, 173 nt, Artificial Sequence
  gNA Variant Scaffold
acuggcgcuuuuaucugauuacuuugagagccaucaccagcgacuaugucguaguggguaaagcugcacggugggcgcagcuucggcugacgguacaccggugggcgcagcuucggcugacgguacaccggugggcgcagcuucggcugacgguacaccgugcagcaucaaag

SEQ ID NO: 43583 - RNA, 203 nt, Artificial Sequence
  gNA Variant Scaffold
acuggcgcuuuuaucugauuacuuugagagccaucaccagcgacuaugucguaguggguaaagcugcacggugggcgcagcuucggcugacgguacaccggugggcgcagcuucggcugacgguacaccggugggcgcagcuucggcugacgguacaccggugggcgcagcuucggcugacgguacaccgugcagcaucaaag

SEQ ID NO: 43584 - RNA, 233 nt, Artificial Sequence
  gNA Variant Scaffold
acuggcgcuuuuaucugauuacuuugagagccaucaccagcgacuaugucguaguggguaaagcugcacggugggcgcagcuucggcugacgguacaccggugggcgcagcuucggcugacgguacaccggugggcgcagcuucggcugacgguacaccggugggcgcagcuucggcugacgguacaccggugggcgcagcuucggcugacgguacaccgugcagcaucaaag

SEQ ID NO: 43585 - RNA, 97 nt, Artificial Sequence
  gNA Variant Scaffold
acuggcgcuuuuaucugauuacuuugagagccaucaccagcgacuaugucguaguggguaaagcugcaccuagcggaggcuaggugcagcaucaaag

SEQ ID NO: 43586 - RNA, 118 nt, Artificial Sequence
  gNA Variant Scaffold
acuggcgcuuuuaucugauuacuuugagagccaucaccagcgacuaugucguaguggguaaagcugcaccucggcuugcugaagcgcgcacggcaagaggcgaggugcagcaucaaag

SEQ ID NO: 43587 - RNA, 192 nt, Artificial Sequence
  gNA Variant Scaffold
acuggcgcuuuuaucugauuacuuugagagccaucaccagcgacuaugucguaguggguaaagcugcaccucucucgacgcaggacucggcuugcugaagcgcgcacggcaagaggcgaggggcggcgacuggugaguacgccaaaaauuuugacuagcggaggcuagaaggagagaggugcagcaucaaag

SEQ ID NO: 43588 - RNA, 156 nt, Artificial Sequence
  gNA Variant Scaffold
acuggcgcuuuuaucugauuacuuugagagccaucaccagcgacuaugucguaguggguaaagcugcacggugcccgucuguugugucgagagacgccaaaaauuuugacuagcggaggcuagaaggagagagaugggugccgugcagcaucaaag

SEQ ID NO: 43589 - RNA, 96 nt, Artificial Sequence
  gNA Variant Scaffold
acuggcgcuuuuaucugauuacuuugagagccaucaccagcgacuaugucguaguggguaaagcugcacauggagaggagaugugcagcaucaaag

SEQ ID NO: 43590 - RNA, 91 nt, Artificial Sequence
  gNA Variant Scaffold
acuggcgcuuuuaucugauuacuuugagagccaucaccagcgacuaugucguaguggguaaagcugcacauggagaugugcagcaucaaag

SEQ ID NO: 43591 - RNA, 106 nt, Artificial Sequence
  gNA Variant Scaffold
acuggcgcuuuuaucugauuacuuugagagccaucaccagcgacuaugucguaguggguaaagcuugggcgcagcgucaaugacgcugacgguacaagcaucaaag

SEQ ID NO: 43592 - RNA, 145 nt, Artificial Sequence
  gNA Variant Scaffold
acuggcgcuuuuaucugauuacuuugagagccaucaccagcgacuaugucguaguggguaaagcugcacuaugggcgcagcgucaaugacgcugacgguacaggccacaugaggaucacccaugugguauagugcagcaucaaag

SEQ ID NO: 43593 - RNA, 155 nt, Artificial Sequence
  gNA Variant Scaffold
acuggcgcuuuuaucugauuacuuugagagccaucaccagcgacuaugucguaguggguaaagcugcacuaugggcgcagcucaugaggaucacccaugagcugacgguacaggccacaugaggaucacccaugugguauagugcagcaucaaag

SEQ ID NO: 43594 - RNA, 151 nt, Artificial Sequence
  gNA Variant Scaffold
acuggcgcuuuuaucugauuacuuugagagccaucaccagcgacuaugucguaguggguaaagcugcacuaugggcgcagcgucaaugacgcugacgguacaggccacauggcagucguaacgacgcgggugguauagugcagcaucaaag

SEQ ID NO: 43595 - RNA, 172 nt, Artificial Sequence
  gNA Variant Scaffold
acuggcgcuuuuaucugauuacuuugagagccaucaccagcgacuaugucguaguggguaaagcugcacuaugggcgcagcaaacauggcaguccuaaggacgcggguuuugcugacgguacaggccacauggcagucguaacgacgcgggugguauagugcagcaucaaag

SEQ ID NO: 43596 - RNA, 159 nt, Artificial Sequence
  gNA Variant Scaffold
acuggcgcuuuuaucugauuacuuugagagccaucaccagcgacuaugucguaguggguaaagcugcacuaugggcgcagacauggcagucguaacgacgcgggucugacgguacaggccacaugaggaucacccaugugguauagugcagcaucaaag

SEQ ID NO: 43597 - RNA, 108 nt, Artificial Sequence
  gNA Variant Scaffold
acuggcgcuuuuaucugauuacuuugagagccaucaccagcgacuaugucguaguggguaaagcugcacuaaggaguuuauauggaaacccuuagugcagcaucaaag

SEQ ID NO: 43598 - RNA, 242 nt, Artificial Sequence
  gNA Variant Scaffold
acuggcgcuuuuaucugauuacuuugagagccaucaccagcgacuaugucguaguggguaaagcucaggaagcacuaugggcgcagcgucaaugacgcugacgguacaggccagacaauuauugucugguauagugcagcagcagaacaauuugcugagggcuauugaggcgcaacagcaucuguugcaacucacagucuggggcaucaagcagcuccaggcaagaauccugagcaucaaag

SEQ ID NO: 43599 - RNA, 98 nt, Artificial Sequence
  gNA Variant Scaffold
acuggcgcuuuuaucugauuacuuugagagccaucaccagcgacuaugucguaguggguaaagcugcacgcccugaagaagggcgugcagcaucaaag

SEQ ID NO: 43600 - RNA, 111 nt, Artificial Sequence
  gNA Variant Scaffold
acuggcgcuuuuaucugauuacuuugagagccaucaccagcgacuaugucguaguggguaaagcugcacggcucguguagcucauuagcuccgagccgugcagcaucaaag

SEQ ID NO: 43601 - RNA, 113 nt, Artificial Sequence
  gNA Variant Scaffold
acuggcgcuuuuaucugauuacuuugagagccaucaccagcgacuaugucguaguggguaaagcugcacccgugugcauccgcagugucggauccacgggugcagcaucaaag

SEQ ID NO: 43602 - RNA, 112 nt, Artificial Sequence
  gNA Variant Scaffold
acuggcgcuuuuaucugauuacuuugagagccaucaccagcgacuaugucguaguggguaaagcugcacggaauccauugcacuccggauuucacuaggugcagcaucaaag

SEQ ID NO: 43603 - RNA, 103 nt, Artificial Sequence
  gNA Variant Scaffold
acuggcgcuuuuaucugauuacuuugagagccaucaccagcgacuaugucguaguggguaaagcugcacaugcaugucuaagacagcaugugcagcaucaaag

SEQ ID NO: 43604 - RNA, 106 nt, Artificial Sequence
  gNA Variant Scaffold
acuggcgcuuuuaucugauuacuuugagagccaucaccagcgacuaugucguaguggguaaagcugcacaaaacauaaggaaaaccuauguugugcagcaucaaag

SEQ ID NO: 43605 - RNA, 153 nt, Artificial Sequence
  gNA Variant Scaffold
acuggcgcuucuaucugauuacucugagcgccaucaccagcgacuaugucguaguggguaaagccgcuuacggacuaugggcgcagcgucaaugacgcugacgguacaggccagacaauuauugucugguauaguccguaagaggcaucagag

SEQ ID NO: 43606 - RNA, 147 nt, Artificial Sequence
  gNA Variant Scaffold
acuggcgcuucuaucugauuacucugagcgccaucaccagcgacuaugucguaguggguaaagccgcuuacgggugggcgcagcgucaaugacgcugacgguacaggccagacaauuauugucugguacccguaagaggcaucagag

SEQ ID NO: 43607 - RNA, 153 nt, Artificial Sequence
  gNA Variant Scaffold
acuggcgcuucuaucugauuacucugagcgccaucaccagcgacuaugucguaguggguaaagccgcuuacgguaugggcgcagcgucaaugacgcugacgguacaggccacaugaggaucacccaugugguauaccguaagaggcaucagag

SEQ ID NO: 43608 - RNA, 143 nt, Artificial Sequence
  gNA Variant Scaffold
acuggcgcuuuuaucugauuacuuugagagccaucaccagcgacuaugucguaguggguaaagcucccuaugggcgcagcgucaaugacgcugacgguacaggccacaugaggaucacccaugugguauagggagcaucaaag

SEQ ID NO: 43609 - RNA, 163 nt, Artificial Sequence
  gNA Variant Scaffold
acuggcgcuucuaucugauuacucugagcgccaucaccagcgacuaugucguaguggguaaagccgcuuacgguaugggcgcagcucaugaggaucacccaugagcugacgguacaggccacaugaggaucacccaugugguauaccguaagaggcaucagag

SEQ ID NO: 43610 - RNA, 153 nt, Artificial Sequence
  gNA Variant Scaffold
acuggcgcuuuuaucugauuacuuugagagccaucaccagcgacuaugucguaguggguaaagcucccuaugggcgcagcucaugaggaucacccaugagcugacgguacaggccacaugaggaucacccaugugguauagggagcaucaaag

SEQ ID NO: 43611 - RNA, 159 nt, Artificial Sequence
  gNA Variant Scaffold
acuggcgcuucuaucugauuacucugagcgccaucaccagcgacuaugucguaguggguaaagccgcuuacgguaugggcgcagcgucaaugacgcugacgguacaggccacauggcagucguaacgacgcgggugguauaccguaagaggcaucagag

SEQ ID NO: 43612 - RNA, 149 nt, Artificial Sequence
  gNA Variant Scaffold
acuggcgcuuuuaucugauuacuuugagagccaucaccagcgacuaugucguaguggguaaagcucccuaugggcgcagcgucaaugacgcugacgguacaggccacauggcagucguaacgacgcgggugguauagggagcaucaaag

SEQ ID NO: 43613 - RNA, 180 nt, Artificial Sequence
  gNA Variant Scaffold
acuggcgcuucuaucugauuacucugagcgccaucaccagcgacuaugucguaguggguaaagccgcuuacgguaugggcgcagcaaacauggcaguccuaaggacgcggguuuugcugacgguacaggccacauggcagucguaacgacgcgggugguauaccguaagaggcaucagag

SEQ ID NO: 43614 - RNA, 170 nt, Artificial Sequence
  gNA Variant Scaffold
acuggcgcuuuuaucugauuacuuugagagccaucaccagcgacuaugucguaguggguaaagcucccuaugggcgcagcaaacauggcaguccuaaggacgcggguuuugcugacgguacaggccacauggcagucguaacgacgcgggugguauagggagcaucaaag

SEQ ID NO: 43615 - RNA, 167 nt, Artificial Sequence
  gNA Variant Scaffold
acuggcgcuucuaucugauuacucugagcgccaucaccagcgacuaugucguaguggguaaagccgcuuacgguaugggcgcagacauggcagucguaacgacgcgggucugacgguacaggccacaugaggaucacccaugugguauaccguaagaggcaucagag

SEQ ID NO: 43616 - RNA, 157 nt, Artificial Sequence
  gNA Variant Scaffold
acuggcgcuuuuaucugauuacuuugagagccaucaccagcgacuaugucguaguggguaaagcucccuaugggcgcagacauggcagucguaacgacgcgggucugacgguacaggccacaugaggaucacccaugugguauagggagcaucaaag

SEQ ID NO: 43617 - RNA, 155 nt, Artificial Sequence
  gNA Variant Scaffold
acuggcgcuuuuaucugauuacuuugagagccaucaccagcgacuaugucguaguggguaaagcugcacuaugggcgcagcaccugaggaucacccaggugcugacgguacaggccaccugaggaucacccaggugguauagugcagcaucaaag

SEQ ID NO: 43618 - RNA, 155 nt, Artificial Sequence
  gNA Variant Scaffold
acuggcgcuuuuaucugauuacuuugagagccaucaccagcgacuaugucguaguggguaaagcugcacuaugggcgcagcgcaugaggaucacccaugcgcugacgguacaggccgcaugaggaucacccaugcgguauagugcagcaucaaag

SEQ ID NO: 43619 - RNA, 155 nt, Artificial Sequence
  gNA Variant Scaffold
acuggcgcuuuuaucugauuacuuugagagccaucaccagcgacuaugucguaguggguaaagcugcacuaugggcgcagcgccugaggaucacccaggcgcugacgguacaggccgccugaggaucacccaggcgguauagugcagcaucaaag

SEQ ID NO: 43620 - RNA, 155 nt, Artificial Sequence
  gNA Variant Scaffold
acuggcgcuuuuaucugauuacuuugagagccaucaccagcgacuaugucguaguggguaaagcugcacuaugggcgcagcgccugagcaucagccaggcgcugacgguacaggccgccugagcaucagccaggcgguauagugcagcaucaaag

SEQ ID NO: 43621 - RNA, 155 nt, Artificial Sequence
  gNA Variant Scaffold
acuggcgcuuuuaucugauuacuuugagagccaucaccagcgacuaugucguaguggguaaagcugcacuaugggcgcagcacaugagcaucagccaugugcugacgguacaggccacaugagcaucagccaugugguauagugcagcaucaaag

SEQ ID NO: 43622 - RNA, 155 nt, Artificial Sequence
  gNA Variant Scaffold
acuggcgcuuuuaucugauuacuuugagagccaucaccagcgacuaugucguaguggguaaagcugcacuaugggcgcagcacaugaguaucaaccaugugcugacgguacaggccacaugaguaucaaccaugugguauagugcagcaucaaag

SEQ ID NO: 43623 - RNA, 155 nt, Artificial Sequence
  gNA Variant Scaffold
acuggcgcuuuuaucugauuacuuugagagccaucaccagcgacuaugucguaguggguaaagcugcacuaugggcgcagcacaugagaaucagccaugugcugacgguacaggccacaugagaaucagccaugugguauagugcagcaucaaag

SEQ ID NO: 43624 - RNA, 155 nt, Artificial Sequence
  gNA Variant Scaffold
acuggcgcuuuuaucugauuacuuugagagccaucaccagcgacuaugucguaguggguaaagcugcacuaugggcgcagcccuugaggaucacccaugugcugacgguacaggccccuugaggaucacccaugugguauagugcagcaucaaag

SEQ ID NO: 43625 - RNA, 155 nt, Artificial Sequence
  gNA Variant Scaffold
acuggcgcuuuuaucugauuacuuugagagccaucaccagcgacuaugucguaguggguaaagcugcacuaugggcgcagcacuugaggaucacccaugugcugacgguacaggccacuugaggaucacccaugugguauagugcagcaucaaag

SEQ ID NO: 43626 - RNA, 155 nt, Artificial Sequence
  gNA Variant Scaffold
acuggcgcuuuuaucugauuacuuugagagccaucaccagcgacuaugucguaguggguaaagcugcacuaugggcgcagcaccugaggaucacccaugugcugacgguacaggccaccugaggaucacccaugugguauagugcagcaucaaag

SEQ ID NO: 43627 - RNA, 155 nt, Artificial Sequence
  gNA Variant Scaffold
acuggcgcuuuuaucugauuacuuugagagccaucaccagcgacuaugucguaguggguaaagcugcacuaugggcgcagcacaugaggaucaccuaugugcugacgguacaggccacaugaggaucaccuaugugguauagugcagcaucaaag

SEQ ID NO: 43628 - RNA, 155 nt, Artificial Sequence
  gNA Variant Scaffold
acuggcgcuuuuaucugauuacuuugagagccaucaccagcgacuaugucguaguggguaaagcugcacuaugggcgcagcacauuaggaucaccaaugugcugacgguacaggccacauuaggaucaccaaugugguauagugcagcaucaaag

SEQ ID NO: 43629 - RNA, 155 nt, Artificial Sequence
  gNA Variant Scaffold
acuggcgcuuuuaucugauuacuuugagagccaucaccagcgacuaugucguaguggguaaagcugcacuaugggcgcagcacauuaggaucaccgaugugcugacgguacaggccacauuaggaucaccgaugugguauagugcagcaucaaag

SEQ ID NO: 43630 - RNA, 155 nt, Artificial Sequence
  gNA Variant Scaffold
acuggcgcuuuuaucugauuacuuugagagccaucaccagcgacuaugucguaguggguaaagcugcacuaugggcgcagcacauuaggaucaccuaugugcugacgguacaggccacauuaggaucaccuaugugguauagugcagcaucaaag

SEQ ID NO: 43631 - RNA, 155 nt, Artificial Sequence
  gNA Variant Scaffold
acuggcgcuuuuaucugauuacuuugagagccaucaccagcgacuaugucguaguggguaaagcugcacuaugggcgcagcacaugaggauuacccaugugcugacgguacaggccacaugaggauuacccaugugguauagugcagcaucaaag

SEQ ID NO: 43632 - RNA, 155 nt, Artificial Sequence
  gNA Variant Scaffold
acuggcgcuuuuaucugauuacuuugagagccaucaccagcgacuaugucguaguggguaaagcugcacuaugggcgcagcacaugaggauaacccaugugcugacgguacaggccacaugaggauaacccaugugguauagugcagcaucaaag

SEQ ID NO: 43633 - RNA, 155 nt, Artificial Sequence
  gNA Variant Scaffold
acuggcgcuuuuaucugauuacuuugagagccaucaccagcgacuaugucguaguggguaaagcugcacuaugggcgcagcacaugaggaugacccaugugcugacgguacaggccacaugaggaugacccaugugguauagugcagcaucaaag

SEQ ID NO: 43634 - RNA, 155 nt, Artificial Sequence
  gNA Variant Scaffold
acuggcgcuuuuaucugauuacuuugagagccaucaccagcgacuaugucguaguggguaaagcugcacuaugggcgcagcacaugaggaccacccaugugcugacgguacaggccacaugaggaccacccaugugguauagugcagcaucaaag

SEQ ID NO: 43635 - RNA, 155 nt, Artificial Sequence
  gNA Variant Scaffold
acuggcgcuuuuaucugauuacuuugagagccaucaccagcgacuaugucguaguggguaaagcugcacuaugggcgcagcagaugaggaucacccaugggcugacgguacaggccagaugaggaucacccaugggguauagugcagcaucaaag

SEQ ID NO: 43636 - RNA, 155 nt, Artificial Sequence
  gNA Variant Scaffold
acuggcgcuuuuaucugauuacuuugagagccaucaccagcgacuaugucguaguggguaaagcugcacuaugggcgcagcacauggggaucacccaugugcugacgguacaggccacauggggaucacccaugugguauagugcagcaucaaag

SEQ ID NO: 43637 - RNA, 155 nt, Artificial Sequence
  gNA Variant Scaffold
acuggcgcuuuuaucugauuacuuugagagccaucaccagcgacuaugucguaguggguaaagcugcacuaugggcgcagcacaugaggaucacccaugugcugacgguacaggccacaugaggaucacccaugugguauagugcagcaucaaag

SEQ ID NO: 43638 - RNA, 96 nt, Artificial Sequence
  gNA Variant Scaffold
acuggcgcuuuuaucugauuacuuugagagccaucaccagcgacuaugucguaguggguaaagcucaccugaggaucacccaggugagcaucaaag

SEQ ID NO: 43639 - RNA, 96 nt, Artificial Sequence
  gNA Variant Scaffold
acuggcgcuuuuaucugauuacuuugagagccaucaccagcgacuaugucguaguggguaaagcucgcaugaggaucacccaugcgagcaucaaag

SEQ ID NO: 43640 - RNA, 96 nt, Artificial Sequence
  gNA Variant Scaffold
acuggcgcuuuuaucugauuacuuugagagccaucaccagcgacuaugucguaguggguaaagcucgccugaggaucacccaggcgagcaucaaag

SEQ ID NO: 43641 - RNA, 96 nt, Artificial Sequence
  gNA Variant Scaffold
acuggcgcuuuuaucugauuacuuugagagccaucaccagcgacuaugucguaguggguaaagcucgccugagcaucagccaggcgagcaucaaag

SEQ ID NO: 43642 - RNA, 96 nt, Artificial Sequence
  gNA Variant Scaffold
acuggcgcuuuuaucugauuacuuugagagccaucaccagcgacuaugucguaguggguaaagcucacaugagcaucagccaugugagcaucaaag

SEQ ID NO: 43643 - RNA, 96 nt, Artificial Sequence
  gNA Variant Scaffold
acuggcgcuuuuaucugauuacuuugagagccaucaccagcgacuaugucguaguggguaaagcucacaugaguaucaaccaugugagcaucaaag

SEQ ID NO: 43644 - RNA, 96 nt, Artificial Sequence
  gNA Variant Scaffold
acuggcgcuuuuaucugauuacuuugagagccaucaccagcgacuaugucguaguggguaaagcucacaugagaaucagccaugugagcaucaaag

SEQ ID NO: 43645 - RNA, 96 nt, Artificial Sequence
  gNA Variant Scaffold
acuggcgcuuuuaucugauuacuuugagagccaucaccagcgacuaugucguaguggguaaagcucccuugaggaucacccaugugagcaucaaag

SEQ ID NO: 43646 - RNA, 96 nt, Artificial Sequence
  gNA Variant Scaffold
acuggcgcuuuuaucugauuacuuugagagccaucaccagcgacuaugucguaguggguaaagcucacuugaggaucacccaugugagcaucaaag

SEQ ID NO: 43647 - RNA, 96 nt, Artificial Sequence
  gNA Variant Scaffold
acuggcgcuuuuaucugauuacuuugagagccaucaccagcgacuaugucguaguggguaaagcucaccugaggaucacccaugugagcaucaaag

SEQ ID NO: 43648 - RNA, 96 nt, Artificial Sequence
  gNA Variant Scaffold
acuggcgcuuuuaucugauuacuuugagagccaucaccagcgacuaugucguaguggguaaagcucacaugaggaucaccuaugugagcaucaaag

SEQ ID NO: 43649 - RNA, 96 nt, Artificial Sequence
  gNA Variant Scaffold
acuggcgcuuuuaucugauuacuuugagagccaucaccagcgacuaugucguaguggguaaagcucacauuaggaucaccaaugugagcaucaaag

SEQ ID NO: 43650 - RNA, 96 nt, Artificial Sequence
  gNA Variant Scaffold
acuggcgcuuuuaucugauuacuuugagagccaucaccagcgacuaugucguaguggguaaagcucacauuaggaucaccgaugugagcaucaaag

SEQ ID NO: 43651 - RNA, 96 nt, Artificial Sequence
  gNA Variant Scaffold
acuggcgcuuuuaucugauuacuuugagagccaucaccagcgacuaugucguaguggguaaagcucacauuaggaucaccuaugugagcaucaaag

SEQ ID NO: 43652 - RNA, 96 nt, Artificial Sequence
  gNA Variant Scaffold
acuggcgcuuuuaucugauuacuuugagagccaucaccagcgacuaugucguaguggguaaagcucacaugaggauuacccaugugagcaucaaag

SEQ ID NO: 43653 - RNA, 96 nt, Artificial Sequence
  gNA Variant Scaffold
acuggcgcuuuuaucugauuacuuugagagccaucaccagcgacuaugucguaguggguaaagcucacaugaggauaacccaugugagcaucaaag

SEQ ID NO: 43654 - RNA, 96 nt, Artificial Sequence
  gNA Variant Scaffold
acuggcgcuuuuaucugauuacuuugagagccaucaccagcgacuaugucguaguggguaaagcucacaugaggaugacccaugugagcaucaaag

SEQ ID NO: 43655 - RNA, 96 nt, Artificial Sequence
  gNA Variant Scaffold
acuggcgcuuuuaucugauuacuuugagagccaucaccagcgacuaugucguaguggguaaagcucacaugaggaccacccaugugagcaucaaag

SEQ ID NO: 43656 - RNA, 96 nt, Artificial Sequence
  gNA Variant Scaffold
acuggcgcuuuuaucugauuacuuugagagccaucaccagcgacuaugucguaguggguaaagcucagaugaggaucacccaugggagcaucaaag

SEQ ID NO: 43657 - RNA, 96 nt, Artificial Sequence
  gNA Variant Scaffold
acuggcgcuuuuaucugauuacuuugagagccaucaccagcgacuaugucguaguggguaaagcucacauggggaucacccaugugagcaucaaag

SEQ ID NO: 43658 - RNA, 96 nt, Artificial Sequence
  gNA Variant Scaffold
acuggcgcuucuaucugauuacucugagcgccaucaccagcgacuaugucguaguggguaaagcucacaugaggaucacccaugugagcaucagag

SEQ ID NO: 43659 - RNA, 145 nt, Artificial Sequence
  gNA Variant Scaffold
acuggcgcuucuaucugauuacucugagcgccaucaccagcgacuaugucguaguggguaaagcugcacuaugggcgcagcgucaaugacgcugacgguacaggccacaugaggaucacccaugugguauagugcagcaucagag

SEQ ID NO: 43660 - RNA, 155 nt, Artificial Sequence
  gNA Variant Scaffold
acuggcgcuucuaucugauuacucugagcgccaucaccagcgacuaugucguaguggguaaagcugcacuaugggcgcagcucaugaggaucacccaugagcugacgguacaggccacaugaggaucacccaugugguauagugcagcaucagag

SEQ ID NO: 43661 - RNA, 159 nt, Artificial Sequence
  gNA Variant Scaffold
acuggcgcuucuaucugauuacucugagcgccaucaccagcgacuaugucguaguggguaaagcugcacuaugggcgcagacauggcagucguaacgacgcgggucugacgguacaggccacaugaggaucacccaugugguauagugcagcaucagag

SEQ ID NO: 43662 - protein, 979 aa, Artificial Sequence
  CasX Variant
QEIKRINKIRRRLVKDSNTKKAGKTRGPMKTLLVRVMTPDLRERLENLRKKPENIPQPISNTSRANLNKLLTDYTEMKKAILHVYWEEFQKDPVGLMSRVAQPASKKIDQNKLKPEMDEKGNLTTAGFACSQCGQPLFVYKLEQVSEKGKAYTNYFGRCNVAEHEKLILLAQLKPEKDSDEAVTYSLGKFGQRALDFYSIHVTKESTHPVKPLAQIAGNRYASGPVGKALSDACMGTIASFLSKYQDIIIEHQKVVKGNQKRLESLRELAGKENLEYPSVTLPPQPHTKEGVDAYNEVIARVRMWVNLNLWQKLKLSRDDAKPLLRLKGFPSFPLVERQANEVDWWDMVCNVKKLINEKKEDGKVFWQNLAGYKRQEALRPYLSSEEDRKKGKKFARYQLGDLLLHLEKKHGEDWGKVYDEAWERIDKKVEGLSKHIKLEEERRSEDAQSKAALTDWLRAKASFVIEGLKEADKDEFCRCELKLQKWYGDLRGKPFAIEAENSILDISGFSKQYNCAFIWQKDGVKKLNLYLIINYFKGGKLRFKKIKPEAFEANRFYTVINKKSGEIVPMEVNFNFDDPNLIILPLAFGKRQGREFIWNDLLSLETGSLKLANGRVIEKTLYNRRTRQDEPALFVALTFERREVLDSSNIKPMNLIGVDRGENIPAVIALTDPEGCPLSRFKDSLGNPTHILRIGESYKEKQRTIQAKKEVEQRRAGGYSRKYASKAKNLADDMVRNTARDLLYYAVTQDAMLIFENLSRGFGRQGKRTFMAERQYTRMEDWLTAKLAYEGLPSKTYLSKTLAQYTSKTCSNCGFTITSADYDRVLEKLKKTATGWMTTINGKELKVEGQITYYNRYKRQNVVKDLSVELDRLSEESVNNDISSWTKGRSGEALSLLKKRFSHRPVQEKFVCLNCGFETHADEQAALNIARSWLFLRSQEYKKYQTNKTTGNTDKRAFVETWQSFYRKKLKEVWKPAV

SEQ ID NO: 43663 - protein, 979 aa, Artificial Sequence
  CasX Variant
QEIKRINKIRRRLVKDSNTKKAGKTRGPMKTLLVRVMTPDLRERLENLRKKPENIPQPISNTSRANLNKLLTDYTEMKKAILHVYWEEFQKDPVGLMSRVAQPASKKIDQNKLKPEMDEKGNLTTAGFACSQCGQPLFVYKLEQVSEKGKAYTNYFGRCNVAEHEKLILLAQLKPEKDSDEAVTYSLGKFGQRALDFYSIHVTKESTHPVKPLAQIAGNRYASYPVGKALSDACMGTIASFLSKYQDIIIEHQKVVKGNQKRLESLRELAGKENLEYPSVTLPPQPHTKEGVDAYNEVIARVRMWVNLNLWQKLKLSRDDAKPLLRLKGFPSFPLVERQANEVDWWDMVCNVKKLINEKKEDGKVFWQNLAGYKRQEALRPYLSSEEDRKKGKKFARYQLGDLLLHLEKKHGEDWGKVYDEAWERIDKKVEGLSKHIKLEEERRSEDAQSKAALTDWLRAKASFVIEGLKEADKDEFCRCELKLQKWYGDLRGKPFAIEAENSILDISGFSKQYNCAFIWQKDGVKKLNLYLIINYFKGGKLRFKKIKPEAFEANRFYTVINKKSGEIVPMEVNFNFDDPNLIILPLAFGKRQGREFIWNDLLSLETGSLKLANGRVIEKTLYNRRTRQDEPALFVALTFERREVLDSSNIKPMNLIGVDRGENIPAVIALTDPEGCPLSRFKDSLGNPTHILRIGESYKEKQRTIQAKKEVEQRRAGGYSRKYASKAKNLADDMVRNTARDLLYYAVTQDAMLIFENLSRGFGRQGKRTFMAERQYTRMEDWLTAKLAYEGLPSKTYLSKTLAQYTSKTCSNCGFTITSADYDRVLEKLKKTATGWMTTINGKELKVEGQITYYNRYKRQNVVKDLSVELDRLSEESVNNDISSWTKGRSGEALSLLKKRFSHRPVQEKFVCLNCGFETHADEQAALNIARSWLFLRSQEYKKYQTNKTTGNTDKRAFVETWQSFYRKKLKEVWKPAV

SEQ ID NO: 43664 - protein, 978 aa, Artificial Sequence
  CasX Variant
QEIKRINKIRRRLVKDSNTKKAGKTGPMKTLLVRVMTPDLRERLENLRKKPENIPQPISNTSRANLNKLLTDYTEMKKAILHVYWEEFQKDPVGLMSRVAQPASKKIDQNKLKPEMDEKGNLTTAGFACSQCGQPLFVYKLEQVSEKGKAYTNYFGRCNVAEHEKLILLAQLKPEKDSDEAVTYSLGKFGQRALDFYSIHVTKESTHPVKPLAQIAGNRYASHPVGKALSDACMGTIASFLSKYQDIIIEHQKVVKGNQKRLESLRELAGKENLEYPSVTLPPQPHTKEGVDAYNEVIARVRMWVNLNLWQKLKLSRDDAKPLLRLKGFPSFPLVERQANEVDWWDMVCNVKKLINEKKEDGKVFWQNLAGYKRQEALRPYLSSEEDRKKGKKFARYQLGDLLLHLEKKHGEDWGKVYDEAWERIDKKVEGLSKHIKLEEERRSEDAQSKAALTDWLRAKASFVIEGLKEADKDEFCRCELKLQKWYGDLRGKPFAIEAENSILDISGFSKQYNCAFIWQKDGVKKLNLYLIINYFKGGKLRFKKIKPEAFEANRFYTVINKKSGEIVPMEVNFNFDDPNLIILPLAFGKRQGREFIWNDLLSLETGSLKLANGRVIEKTLYNRRTRQDEPALFVALTFERREVLDSSNIKPMNLIGVDRGENIPAVIALTDPEGCPLSRFKDSLGNPTHILRIGESYKEKQRTIQAKKEVEQRRAGGYSRKYASKAKNLADDMVRNTARDLLYYAVTQDAMLIFENLSRGFGRQGKRTFMAERQYTRMEDWLTAKLAYEGLPSKTYLSKTLAQYTSKTCSNCGFTITSADYDRVLEKLKKTATGWMTTINGKELKVEGQITYYNRYKRQNVVKDLSVELDRLSEESVNNDISSWTKGRSGEALSLLKKRFSHRPVQEKFVCLNCGFETHADEQAALNIARSWLFLRSQEYKKYQTNKTTGNTDKRAFVETWQSFYRKKLKEVWKPAV

SEQ ID NO: 43665 - protein, 978 aa, Artificial Sequence
  CasX Variant
QEIKRINKIRRRLVKDSNTKKAGKTGPMKTLLVRVMTPDLRERLENLRKKPENIPQPISNTSRANLNKLLTDYTEMKKAILHVYWEEFQKDPVGLMSRVAQPASKKIDQNKLKPEMDEKGNLTTAGFACSQCGQPLFVYKLEQVSEKGKAYTNYFGRCNVAEHEKLILLAQLKPEKDSDEAVTYSLGKFGQRALDFYSIHVTKESTHPVKPLAQIAGNRYASSPVGKALSDACMGTIASFLSKYQDIIIEHQKVVKGNQKRLESLRELAGKENLEYPSVTLPPQPHTKEGVDAYNEVIARVRMWVNLNLWQKLKLSRDDAKPLLRLKGFPSFPLVERQANEVDWWDMVCNVKKLINEKKEDGKVFWQNLAGYKRQEALRPYLSSEEDRKKGKKFARYQLGDLLLHLEKKHGEDWGKVYDEAWERIDKKVEGLSKHIKLEEERRSEDAQSKAALTDWLRAKASFVIEGLKEADKDEFCRCELKLQKWYGDLRGKPFAIEAENSILDISGFSKQYNCAFIWQKDGVKKLNLYLIINYFKGGKLRFKKIKPEAFEANRFYTVINKKSGEIVPMEVNFNFDDPNLIILPLAFGKRQGREFIWNDLLSLETGSLKLANGRVIEKTLYNRRTRQDEPALFVALTFERREVLDSSNIKPMNLIGVDRGENIPAVIALTDPEGCPLSRFKDSLGNPTHILRIGESYKEKQRTIQAKKEVEQRRAGGYSRKYASKAKNLADDMVRNTARDLLYYAVTQDAMLIFENLSRGFGRQGKRTFMAERQYTRMEDWLTAKLAYEGLPSKTYLSKTLAQYTSKTCSNCGFTITSADYDRVLEKLKKTATGWMTTINGKELKVEGQITYYNRYKRQNVVKDLSVELDRLSEESVNNDISSWTKGRSGEALSLLKKRFSHRPVQEKFVCLNCGFETHADEQAALNIARSWLFLRSQEYKKYQTNKTTGNTDKRAFVETWQSFYRKKLKEVWKPAV

SEQ ID NO: 43666 - protein, 978 aa, Artificial Sequence
  CasX Variant
QEIKRINKIRRRLVKDSNTKKAGKTGPMKTLLVRVMTPDLRERLENLRKKPENIPQPISNTSRANLNKLLTDYTEMKKAILHVYWEEFQKDPVGLMSRVAQPASKKIDQNKLKPEMDEKGNLTTAGFACSQCGQPLFVYKLEQVSEKGKAYTNYFGRCNVAEHEKLILLAQLKPEKDSDEAVTYSLGKFGQRALDFYSIHVTKESTHPVKPLAQIAGNRYASTPVGKALSDACMGTIASFLSKYQDIIIEHQKVVKGNQKRLESLRELAGKENLEYPSVTLPPQPHTKEGVDAYNEVIARVRMWVNLNLWQKLKLSRDDAKPLLRLKGFPSFPLVERQANEVDWWDMVCNVKKLINEKKEDGKVFWQNLAGYKRQEALRPYLSSEEDRKKGKKFARYQLGDLLLHLEKKHGEDWGKVYDEAWERIDKKVEGLSKHIKLEEERRSEDAQSKAALTDWLRAKASFVIEGLKEADKDEFCRCELKLQKWYGDLRGKPFAIEAENSILDISGFSKQYNCAFIWQKDGVKKLNLYLIINYFKGGKLRFKKIKPEAFEANRFYTVINKKSGEIVPMEVNFNFDDPNLIILPLAFGKRQGREFIWNDLLSLETGSLKLANGRVIEKTLYNRRTRQDEPALFVALTFERREVLDSSNIKPMNLIGVDRGENIPAVIALTDPEGCPLSRFKDSLGNPTHILRIGESYKEKQRTIQAKKEVEQRRAGGYSRKYASKAKNLADDMVRNTARDLLYYAVTQDAMLIFENLSRGFGRQGKRTFMAERQYTRMEDWLTAKLAYEGLPSKTYLSKTLAQYTSKTCSNCGFTITSADYDRVLEKLKKTATGWMTTINGKELKVEGQITYYNRYKRQNVVKDLSVELDRLSEESVNNDISSWTKGRSGEALSLLKKRFSHRPVQEKFVCLNCGFETHADEQAALNIARSWLFLRSQEYKKYQTNKTTGNTDKRAFVETWQSFYRKKLKEVWKPAV

SEQ ID NO: 43667 - protein, 978 aa, Artificial Sequence
  CasX Variant
QEIKRINKIRRRLVKDSNTKKAGKTGPMKTLLVRVMTPDLRERLENLRKKPENIPQPISNTSRANLNKLLTDYTEMKKAILHVYWEEFQKDPVGLMSRVAQPASKKIDQNKLKPEMDEKGNLTTAGFACSQCGQPLFVYKLEQVSEKGKAYTNYFGRCNVAEHEKLILLAQLKPEKDSDEAVTYSLGKFGQRALDFYSIHVTKESTHPVKPLAQIAGNRYASAPVGKALSDACMGTIASFLSKYQDIIIEHQKVVKGNQKRLESLRELAGKENLEYPSVTLPPQPHTKEGVDAYNEVIARVRMWVNLNLWQKLKLSRDDAKPLLRLKGFPSFPLVERQANEVDWWDMVCNVKKLINEKKEDGKVFWQNLAGYKRQEALRPYLSSEEDRKKGKKFARYQLGDLLLHLEKKHGEDWGKVYDEAWERIDKKVEGLSKHIKLEEERRSEDAQSKAALTDWLRAKASFVIEGLKEADKDEFCRCELKLQKWYGDLRGKPFAIEAENSILDISGFSKQYNCAFIWQKDGVKKLNLYLIINYFKGGKLRFKKIKPEAFEANRFYTVINKKSGEIVPMEVNFNFDDPNLIILPLAFGKRQGREFIWNDLLSLETGSLKLANGRVIEKTLYNRRTRQDEPALFVALTFERREVLDSSNIKPMNLIGVDRGENIPAVIALTDPEGCPLSRFKDSLGNPTHILRIGESYKEKQRTIQAKKEVEQRRAGGYSRKYASKAKNLADDMVRNTARDLLYYAVTQDAMLIFENLSRGFGRQGKRTFMAERQYTRMEDWLTAKLAYEGLPSKTYLSKTLAQYTSKTCSNCGFTITSADYDRVLEKLKKTATGWMTTINGKELKVEGQITYYNRYKRQNVVKDLSVELDRLSEESVNNDISSWTKGRSGEALSLLKKRFSHRPVQEKFVCLNCGFETHADEQAALNIARSWLFLRSQEYKKYQTNKTTGNTDKRAFVETWQSFYRKKLKEVWKPAV

SEQ ID NO: 43668 - protein, 978 aa, Artificial Sequence
  CasX Variant
QEIKRINKIRRRLVKDSNTKKAGKTGPMKTLLVRVMTPDLRERLENLRKKPENIPQPISNTSRANLNKLLTDYTEMKKAILHVYWEEFQKDPVGLMSRVAQPASKKIDQNKLKPEMDEKGNLTTAGFACSQCGQPLFVYKLEQVSEKGKAYTNYFGRCNVAEHEKLILLAQLKPEKDSDEAVTYSLGKFGQRALDFYSIHVTKESTHPVKPLAQIAGNRYASVPVGKALSDACMGTIASFLSKYQDIIIEHQKVVKGNQKRLESLRELAGKENLEYPSVTLPPQPHTKEGVDAYNEVIARVRMWVNLNLWQKLKLSRDDAKPLLRLKGFPSFPLVERQANEVDWWDMVCNVKKLINEKKEDGKVFWQNLAGYKRQEALRPYLSSEEDRKKGKKFARYQLGDLLLHLEKKHGEDWGKVYDEAWERIDKKVEGLSKHIKLEEERRSEDAQSKAALTDWLRAKASFVIEGLKEADKDEFCRCELKLQKWYGDLRGKPFAIEAENSILDISGFSKQYNCAFIWQKDGVKKLNLYLIINYFKGGKLRFKKIKPEAFEANRFYTVINKKSGEIVPMEVNFNFDDPNLIILPLAFGKRQGREFIWNDLLSLETGSLKLANGRVIEKTLYNRRTRQDEPALFVALTFERREVLDSSNIKPMNLIGVDRGENIPAVIALTDPEGCPLSRFKDSLGNPTHILRIGESYKEKQRTIQAKKEVEQRRAGGYSRKYASKAKNLADDMVRNTARDLLYYAVTQDAMLIFENLSRGFGRQGKRTFMAERQYTRMEDWLTAKLAYEGLPSKTYLSKTLAQYTSKTCSNCGFTITSADYDRVLEKLKKTATGWMTTINGKELKVEGQITYYNRYKRQNVVKDLSVELDRLSEESVNNDISSWTKGRSGEALSLLKKRFSHRPVQEKFVCLNCGFETHADEQAALNIARSWLFLRSQEYKKYQTNKTTGNTDKRAFVETWQSFYRKKLKEVWKPAV

SEQ ID NO: 43669 - protein, 978 aa, Artificial Sequence
  CasX Variant
QEIKRINKIRRRLVKDSNTKKAGKTGPMKTLLVRVMTPDLRERLENLRKKPENIPQPISNTSRANLNKLLTDYTEMKKAILHVYWEEFQKDPVGLMSRVAQPASKKIDQNKLKPEMDEKGNLTTAGFACSQCGQPLFVYKLEQVSEKGKAYTNYFGRCNVAEHEKLILLAQLKPEKDSDEAVTYSLGKFGQRALDFYSIHVTKESTHPVKPLAQIAGNRYASGPVGKALSLACMGTIASFLSKYQDIIIEHQKVVKGNQKRLESLRELAGKENLEYPSVTLPPQPHTKEGVDAYNEVIARVRMWVNLNLWQKLKLSRDDAKPLLRLKGFPSFPLVERQANEVDWWDMVCNVKKLINEKKEDGKVFWQNLAGYKRQEALRPYLSSEEDRKKGKKFARYQLGDLLLHLEKKHGEDWGKVYDEAWERIDKKVEGLSKHIKLEEERRSEDAQSKAALTDWLRAKASFVIEGLKEADKDEFCRCELKLQKWYGDLRGKPFAIEAENSILDISGFSKQYNCAFIWQKDGVKKLNLYLIINYFKGGKLRFKKIKPEAFEANRFYTVINKKSGEIVPMEVNFNFDDPNLIILPLAFGKRQGREFIWNDLLSLETGSLKLANGRVIEKTLYNRRTRQDEPALFVALTFERREVLDSSNIKPMNLIGVDRGENIPAVIALTDPEGCPLSRFKDSLGNPTHILRIGESYKEKQRTIQAKKEVEQRRAGGYSRKYASKAKNLADDMVRNTARDLLYYAVTQDAMLIFENLSRGFGRQGKRTFMAERQYTRMEDWLTAKLAYEGLPSKTYLSKTLAQYTSKTCSNCGFTITSADYDRVLEKLKKTATGWMTTINGKELKVEGQITYYNRYKRQNVVKDLSVELDRLSEESVNNDISSWTKGRSGEALSLLKKRFSHRPVQEKFVCLNCGFETHADEQAALNIARSWLFLRSQEYKKYQTNKTTGNTDKRAFVETWQSFYRKKLKEVWKPAV

SEQ ID NO: 43670 - protein, 978 aa, Artificial Sequence
  CasX Variant
QEIKRINKIRRRLVKDSNTKKAGKTGPMKTLLVRVMTPDLRERLENLRKKPENIPQPISNTSRANLNKLLTDYTEMKKAILHVYWEEFQKDPVGLMSRVAQPASKKIDQNKLKPEMDEKGNLTTAGFACSQCGQPLFVYKLEQVSEKGKAYTNYFGRCNVAEHEKLILLAQLKPEKDSDEAVTYSLGKFGQRALDFYSIHVTKESTHPVKPLAQIAGNRYASGPVGKALSNACMGTIASFLSKYQDIIIEHQKVVKGNQKRLESLRELAGKENLEYPSVTLPPQPHTKEGVDAYNEVIARVRMWVNLNLWQKLKLSRDDAKPLLRLKGFPSFPLVERQANEVDWWDMVCNVKKLINEKKEDGKVFWQNLAGYKRQEALRPYLSSEEDRKKGKKFARYQLGDLLLHLEKKHGEDWGKVYDEAWERIDKKVEGLSKHIKLEEERRSEDAQSKAALTDWLRAKASFVIEGLKEADKDEFCRCELKLQKWYGDLRGKPFAIEAENSILDISGFSKQYNCAFIWQKDGVKKLNLYLIINYFKGGKLRFKKIKPEAFEANRFYTVINKKSGEIVPMEVNFNFDDPNLIILPLAFGKRQGREFIWNDLLSLETGSLKLANGRVIEKTLYNRRTRQDEPALFVALTFERREVLDSSNIKPMNLIGVDRGENIPAVIALTDPEGCPLSRFKDSLGNPTHILRIGESYKEKQRTIQAKKEVEQRRAGGYSRKYASKAKNLADDMVRNTARDLLYYAVTQDAMLIFENLSRGFGRQGKRTFMAERQYTRMEDWLTAKLAYEGLPSKTYLSKTLAQYTSKTCSNCGFTITSADYDRVLEKLKKTATGWMTTINGKELKVEGQITYYNRYKRQNVVKDLSVELDRLSEESVNNDISSWTKGRSGEALSLLKKRFSHRPVQEKFVCLNCGFETHADEQAALNIARSWLFLRSQEYKKYQTNKTTGNTDKRAFVETWQSFYRKKLKEVWKPAV

SEQ ID NO: 43671 - protein, 978 aa, Artificial Sequence
  CasX Variant
QEIKRINKIRRRLVKDSNTKKAGKTGPMKTLLVRVMTPDLRERLENLRKKPENIPQPISNTSRANLNKLLTDYTEMKKAILHVYWEEFQKDPVGLMSRVAQPASKKIDQNKLKPEMDEKGNLTTAGFACSQCGQPLFVYKLEQVSEKGKAYTNYFGRCNVAEHEKLILLAQLKPEKDSDEAVTYSLGKFGQRALDFYSIHVTKESTHPVKPLAQIAGNRYASGPVGKALSQACMGTIASFLSKYQDIIIEHQKVVKGNQKRLESLRELAGKENLEYPSVTLPPQPHTKEGVDAYNEVIARVRMWVNLNLWQKLKLSRDDAKPLLRLKGFPSFPLVERQANEVDWWDMVCNVKKLINEKKEDGKVFWQNLAGYKRQEALRPYLSSEEDRKKGKKFARYQLGDLLLHLEKKHGEDWGKVYDEAWERIDKKVEGLSKHIKLEEERRSEDAQSKAALTDWLRAKASFVIEGLKEADKDEFCRCELKLQKWYGDLRGKPFAIEAENSILDISGFSKQYNCAFIWQKDGVKKLNLYLIINYFKGGKLRFKKIKPEAFEANRFYTVINKKSGEIVPMEVNFNFDDPNLIILPLAFGKRQGREFIWNDLLSLETGSLKLANGRVIEKTLYNRRTRQDEPALFVALTFERREVLDSSNIKPMNLIGVDRGENIPAVIALTDPEGCPLSRFKDSLGNPTHILRIGESYKEKQRTIQAKKEVEQRRAGGYSRKYASKAKNLADDMVRNTARDLLYYAVTQDAMLIFENLSRGFGRQGKRTFMAERQYTRMEDWLTAKLAYEGLPSKTYLSKTLAQYTSKTCSNCGFTITSADYDRVLEKLKKTATGWMTTINGKELKVEGQITYYNRYKRQNVVKDLSVELDRLSEESVNNDISSWTKGRSGEALSLLKKRFSHRPVQEKFVCLNCGFETHADEQAALNIARSWLFLRSQEYKKYQTNKTTGNTDKRAFVETWQSFYRKKLKEVWKPAV

SEQ ID NO: 43672 - protein, 978 aa, Artificial Sequence
  CasX Variant
QEIKRINKIRRRLVKDSNTKKAGKTGPMKTLLVRVMTPDLRERLENLRKKPENIPQPISNTSRANLNKLLTDYTEMKKAILHVYWEEFQKDPVGLMSRVAQPASKKIDQNKLKPEMDEKGNLTTAGFACSQCGQPLFVYKLEQVSEKGKAYTNYFGRCNVAEHEKLILLAQLKPEKDSDEAVTYSLGKFGQRALDFYSIHVTKESTHPVKPLAQIAGNRYASGPVGKALSSACMGTIASFLSKYQDIIIEHQKVVKGNQKRLESLRELAGKENLEYPSVTLPPQPHTKEGVDAYNEVIARVRMWVNLNLWQKLKLSRDDAKPLLRLKGFPSFPLVERQANEVDWWDMVCNVKKLINEKKEDGKVFWQNLAGYKRQEALRPYLSSEEDRKKGKKFARYQLGDLLLHLEKKHGEDWGKVYDEAWERIDKKVEGLSKHIKLEEERRSEDAQSKAALTDWLRAKASFVIEGLKEADKDEFCRCELKLQKWYGDLRGKPFAIEAENSILDISGFSKQYNCAFIWQKDGVKKLNLYLIINYFKGGKLRFKKIKPEAFEANRFYTVINKKSGEIVPMEVNFNFDDPNLIILPLAFGKRQGREFIWNDLLSLETGSLKLANGRVIEKTLYNRRTRQDEPALFVALTFERREVLDSSNIKPMNLIGVDRGENIPAVIALTDPEGCPLSRFKDSLGNPTHILRIGESYKEKQRTIQAKKEVEQRRAGGYSRKYASKAKNLADDMVRNTARDLLYYAVTQDAMLIFENLSRGFGRQGKRTFMAERQYTRMEDWLTAKLAYEGLPSKTYLSKTLAQYTSKTCSNCGFTITSADYDRVLEKLKKTATGWMTTINGKELKVEGQITYYNRYKRQNVVKDLSVELDRLSEESVNNDISSWTKGRSGEALSLLKKRFSHRPVQEKFVCLNCGFETHADEQAALNIARSWLFLRSQEYKKYQTNKTTGNTDKRAFVETWQSFYRKKLKEVWKPAV

SEQ ID NO: 43673 - protein, 978 aa, Artificial Sequence
  CasX Variant
QEIKRINKIRRRLVKDSNTKKAGKTGPMKTLLVRVMTPDLRERLENLRKKPENIPQPISNTSRANLNKLLTDYTEMKKAILHVYWEEFQKDPVGLMSRVAQPASKKIDQNKLKPEMDEKGNLTTAGFACSQCGQPLFVYKLEQVSEKGKAYTNYFGRCNVAEHEKLILLAQLKPEKDSDEAVTYSLGKFGQRALDFYSIHVTKESTHPVKPLAQIAGNRYASGPVGKALSAACMGTIASFLSKYQDIIIEHQKVVKGNQKRLESLRELAGKENLEYPSVTLPPQPHTKEGVDAYNEVIARVRMWVNLNLWQKLKLSRDDAKPLLRLKGFPSFPLVERQANEVDWWDMVCNVKKLINEKKEDGKVFWQNLAGYKRQEALRPYLSSEEDRKKGKKFARYQLGDLLLHLEKKHGEDWGKVYDEAWERIDKKVEGLSKHIKLEEERRSEDAQSKAALTDWLRAKASFVIEGLKEADKDEFCRCELKLQKWYGDLRGKPFAIEAENSILDISGFSKQYNCAFIWQKDGVKKLNLYLIINYFKGGKLRFKKIKPEAFEANRFYTVINKKSGEIVPMEVNFNFDDPNLIILPLAFGKRQGREFIWNDLLSLETGSLKLANGRVIEKTLYNRRTRQDEPALFVALTFERREVLDSSNIKPMNLIGVDRGENIPAVIALTDPEGCPLSRFKDSLGNPTHILRIGESYKEKQRTIQAKKEVEQRRAGGYSRKYASKAKNLADDMVRNTARDLLYYAVTQDAMLIFENLSRGFGRQGKRTFMAERQYTRMEDWLTAKLAYEGLPSKTYLSKTLAQYTSKTCSNCGFTITSADYDRVLEKLKKTATGWMTTINGKELKVEGQITYYNRYKRQNVVKDLSVELDRLSEESVNNDISSWTKGRSGEALSLLKKRFSHRPVQEKFVCLNCGFETHADEQAALNIARSWLFLRSQEYKKYQTNKTTGNTDKRAFVETWQSFYRKKLKEVWKPAV

SEQ ID NO: 43674 - protein, 978 aa, Artificial Sequence
  CasX Variant
QEIKRINKIRRRLVKDSNTKKAGKTGPMKTLLVRVMTPDLRERLENLRKKPENIPQPISNTSRANLNKLLTDYTEMKKAILHVYWEEFQKDPVGLMSRVAQPASKKIDQNKLKPEMDEKGNLTTAGFACSQCGQPLFVYKLEQVSEKGKAYTNYFGRCNVAEHEKLILLAQLKPEKDSDEAVTYSLGKFGQRALDFYSIHVTKESTHPVKPLAQIAGNRYASGPVGKALSGACMGTIASFLSKYQDIIIEHQKVVKGNQKRLESLRELAGKENLEYPSVTLPPQPHTKEGVDAYNEVIARVRMWVNLNLWQKLKLSRDDAKPLLRLKGFPSFPLVERQANEVDWWDMVCNVKKLINEKKEDGKVFWQNLAGYKRQEALRPYLSSEEDRKKGKKFARYQLGDLLLHLEKKHGEDWGKVYDEAWERIDKKVEGLSKHIKLEEERRSEDAQSKAALTDWLRAKASFVIEGLKEADKDEFCRCELKLQKWYGDLRGKPFAIEAENSILDISGFSKQYNCAFIWQKDGVKKLNLYLIINYFKGGKLRFKKIKPEAFEANRFYTVINKKSGEIVPMEVNFNFDDPNLIILPLAFGKRQGREFIWNDLLSLETGSLKLANGRVIEKTLYNRRTRQDEPALFVALTFERREVLDSSNIKPMNLIGVDRGENIPAVIALTDPEGCPLSRFKDSLGNPTHILRIGESYKEKQRTIQAKKEVEQRRAGGYSRKYASKAKNLADDMVRNTARDLLYYAVTQDAMLIFENLSRGFGRQGKRTFMAERQYTRMEDWLTAKLAYEGLPSKTYLSKTLAQYTSKTCSNCGFTITSADYDRVLEKLKKTATGWMTTINGKELKVEGQITYYNRYKRQNVVKDLSVELDRLSEESVNNDISSWTKGRSGEALSLLKKRFSHRPVQEKFVCLNCGFETHADEQAALNIARSWLFLRSQEYKKYQTNKTTGNTDKRAFVETWQSFYRKKLKEVWKPAV

SEQ ID NO: 43675 - protein, 978 aa, Artificial Sequence
  CasX Variant
QEIKRINKIRRRLVKDSNTKKAGKTGPMKTLLVRVMTPDLRERLENLRKKPENIPQPISNTSRANLNKLLTDYTEMKKAILHVYWEEFQKDPVGLMSRVAQPASKKIDQNKLKPEMDEKGNLTTAGFACSQCGQPLFVYKLEQVSEKGKAYTNYFGRCNVAEHEKLILLAQLKPEKDSDEAVTYSLGKFGQRALDFYSIHVTKESTHPVKPLAQIAGNRYASGPVGKALSTACMGTIASFLSKYQDIIIEHQKVVKGNQKRLESLRELAGKENLEYPSVTLPPQPHTKEGVDAYNEVIARVRMWVNLNLWQKLKLSRDDAKPLLRLKGFPSFPLVERQANEVDWWDMVCNVKKLINEKKEDGKVFWQNLAGYKRQEALRPYLSSEEDRKKGKKFARYQLGDLLLHLEKKHGEDWGKVYDEAWERIDKKVEGLSKHIKLEEERRSEDAQSKAALTDWLRAKASFVIEGLKEADKDEFCRCELKLQKWYGDLRGKPFAIEAENSILDISGFSKQYNCAFIWQKDGVKKLNLYLIINYFKGGKLRFKKIKPEAFEANRFYTVINKKSGEIVPMEVNFNFDDPNLIILPLAFGKRQGREFIWNDLLSLETGSLKLANGRVIEKTLYNRRTRQDEPALFVALTFERREVLDSSNIKPMNLIGVDRGENIPAVIALTDPEGCPLSRFKDSLGNPTHILRIGESYKEKQRTIQAKKEVEQRRAGGYSRKYASKAKNLADDMVRNTARDLLYYAVTQDAMLIFENLSRGFGRQGKRTFMAERQYTRMEDWLTAKLAYEGLPSKTYLSKTLAQYTSKTCSNCGFTITSADYDRVLEKLKKTATGWMTTINGKELKVEGQITYYNRYKRQNVVKDLSVELDRLSEESVNNDISSWTKGRSGEALSLLKKRFSHRPVQEKFVCLNCGFETHADEQAALNIARSWLFLRSQEYKKYQTNKTTGNTDKRAFVETWQSFYRKKLKEVWKPAV

SEQ ID NO: 43676 - protein, 978 aa, Artificial Sequence
  CasX Variant
QEIKRINKIRRRLVKDSNTKKAGKRGPMKTLLVRVMTPDLRERLENLRKKPENIPQPISNTSRANLNKLLTDYTEMKKAILHVYWEEFQKDPVGLMSRVAQPASKKIDQNKLKPEMDEKGNLTTAGFACSQCGQPLFVYKLEQVSEKGKAYTNYFGRCNVAEHEKLILLAQLKPEKDSDEAVTYSLGKFGQRALDFYSIHVTKESTHPVKPLAQIAGNRYASGPVGKALSDACMGTIASFLSKYQDIIIEHQKVVKGNQKRLESLRELAGKENLEYPSVTLPPQPHTKEGVDAYNEVIARVRMWVNLNLWQKLKLSRDDAKPLLRLKGFPSFPLVERQANEVDWWDMVCNVKKLINEKKEDGKVFWQNLAGYKRQEALRPYLSSEEDRKKGKKFARYQLGDLLLHLEKKHGEDWGKVYDEAWERIDKKVEGLSKHIKLEEERRSEDAQSKAALTDWLRAKASFVIEGLKEADKDEFCRCELKLQKWYGDLRGKPFAIEAENSILDISGFSKQYNCAFIWQKDGVKKLNLYLIINYFKGGKLRFKKIKPEAFEANRFYTVINKKSGEIVPMEVNFNFDDPNLIILPLAFGKRQGREFIWNDLLSLETGSLKLANGRVIEKTLYNRRTRQDEPALFVALTFERREVLDSSNIKPMNLIGVDRGENIPAVIALTDPEGCPLSRFKDSLGNPTHILRIGESYKEKQRTIQAKKEVEQRRAGGYSRKYASKAKNLADDMVRNTARDLLYYAVTQDAMLIFENLSRGFGRQGKRTFMAERQYTRMEDWLTAKLAYEGLPSKTYLSKTLAQYTSKTCSNCGFTITSADYDRVLEKLKKTATGWMTTINGKELKVEGQITYYNRYKRQNVVKDLSVELDRLSEESVNNDISSWTKGRSGEALSLLKKRFSHRPVQEKFVCLNCGFETHADEQAALNIARSWLFLRSQEYKKYQTNKTTGNTDKRAFVETWQSFYRKKLKEVWKPAV

SEQ ID NO: 43677 - protein, 978 aa, Artificial Sequence
  CasX Variant
QEIKRINKIRRRLVKDSNTKKAGKTGPMKTLLVRVMTPDLRERLENLRKKPENIPQPISNTSRANLNKLLTDYTEMKKAILHVYWEEFQKDPVGLMSRVAQPASKKIDQNKLKPEMDEKGNLTTAGFACSQCGQPLFVYKLEQVSEKGKAYTNYFGRCNVAEHEKLILLAQLKPEKDSDEAVTYSLGKFGQRALDFYSIHVTKESTHPVKPLAQIAGNRYASGPVGKALSDACMGTIASFLSKYQDIIIEHQKVVKGNQKRLESLRELAGKENLEYPSVTLPPQPHTKEGVDAYNEVIARVRMWVNLNLWQKLKLSRDDAKPLLRLKGFPSFPLVERQANEVDWWDMVCNVKKLINEKKEDGKVFWQNLAGYKRQEALRPYLSSEEDRKKGKKFARYQLHDLLLHLEKKHGEDWGKVYDEAWERIDKKVEGLSKHIKLEEERRSEDAQSKAALTDWLRAKASFVIEGLKEADKDEFCRCELKLQKWYGDLRGKPFAIEAENSILDISGFSKQYNCAFIWQKDGVKKLNLYLIINYFKGGKLRFKKIKPEAFEANRFYTVINKKSGEIVPMEVNFNFDDPNLIILPLAFGKRQGREFIWNDLLSLETGSLKLANGRVIEKTLYNRRTRQDEPALFVALTFERREVLDSSNIKPMNLIGVDRGENIPAVIALTDPEGCPLSRFKDSLGNPTHILRIGESYKEKQRTIQAKKEVEQRRAGGYSRKYASKAKNLADDMVRNTARDLLYYAVTQDAMLIFENLSRGFGRQGKRTFMAERQYTRMEDWLTAKLAYEGLPSKTYLSKTLAQYTSKTCSNCGFTITSADYDRVLEKLKKTATGWMTTINGKELKVEGQITYYNRYKRQNVVKDLSVELDRLSEESVNNDISSWTKGRSGEALSLLKKRFSHRPVQEKFVCLNCGFETHADEQAALNIARSWLFLRSQEYKKYQTNKTTGNTDKRAFVETWQSFYRKKLKEVWKPAV

SEQ ID NO: 43678 - protein, 979 aa, Artificial Sequence
  CasX Variant
QEIKRINKIRRRLVKDSNTKKAGKTGPMKTLLVRVMTPDLRERLENLRKKPENIPQPISNTSRANLNKLLTDYTEMKKAILHVYWEEFQKDPVGLMSRVAQPASKKIDQNKLKPEMDEKEGNLTTAGFACSQCGQPLFVYKLEQVSEKGKAYTNYFGRCNVAEHEKLILLAQLKPEKDSDEAVTYSLGKFGQRALDFYSIHVTKESTHPVKPLAQIAGNRYASGPVGKALSDACMGTIASFLSKYQDIIIEHQKVVKGNQKRLESLRELAGKENLEYPSVTLPPQPHTKEGVDAYNEVIARVRMWVNLNLWQKLKLSRDDAKPLLRLKGFPSFPLVERQANEVDWWDMVCNVKKLINEKKEDGKVFWQNLAGYKRQEALRPYLSSEEDRKKGKKFARYQLGDLLLHLEKKHGEDWGKVYDEAWERIDKKVEGLSKHIKLEEERRSEDAQSKAALTDWLRAKASFVIEGLKEADKDEFCRCELKLQKWYGDLRGKPFAIEAENSILDISGFSKQYNCAFIWQKDGVKKLNLYLIINYFKGGKLRFKKIKPEAFEANRFYTVINKKSGEIVPMEVNFNFDDPNLIILPLAFGKRQGREFIWNDLLSLETGSLKLANGRVIEKTLYNRRTRQDEPALFVALTFERREVLDSSNIKPMNLIGVDRGENIPAVIALTDPEGCPLSRFKDSLGNPTHILRIGESYKEKQRTIQAKKEVEQRRAGGYSRKYASKAKNLADDMVRNTARDLLYYAVTQDAMLIFENLSRGFGRQGKRTFMAERQYTRMEDWLTAKLAYEGLPSKTYLSKTLAQYTSKTCSNCGFTITSADYDRVLEKLKKTATGWMTTINGKELKVEGQITYYNRYKRQNVVKDLSVELDRLSEESVNNDISSWTKGRSGEALSLLKKRFSHRPVQEKFVCLNCGFETHADEQAALNIARSWLFLRSQEYKKYQTNKTTGNTDKRAFVETWQSFYRKKLKEVWKPAV

SEQ ID NO: 43679 - protein, 978 aa, Artificial Sequence
  CasX Variant
QEIKRINKIRRRLVKDSNTKKAGKTGPMKTLLVRVMTPDLRERLENLRKKPENIPQPISNTSRANLNKLLTDYTEMKKAILHVYWEEFQKDPVGLMSRVAQPASKKIDQNKLKPEMDEKGNLTTAGFACSQCGQPLFVYKLEQVSEKGKAYTNYFGRCNVAEHEKLILLAQLKPEKDSDEAVTYSLGKFGQRALDFYSIHVTKESTHPVKPLAQIAGNRYASGPVGKALSDACMGTIASFLSKYQDIIIEHQKVVKGNQKRLESLRELAGKENLEYPSVTLPPQPHTKEGVDAYNEVIARVRMWVNINLWQKLKLSRDDAKPLLRLKGFPSFPLVERQANEVDWWDMVCNVKKLINEKKEDGKVFWQNLAGYKRQEALRPYLSSEEDRKKGKKFARYQLGDLLLHLEKKHGEDWGKVYDEAWERIDKKVEGLSKHIKLEEERRSEDAQSKAALTDWLRAKASFVIEGLKEADKDEFCRCELKLQKWYGDLRGKPFAIEAENSILDISGFSKQYNCAFIWQKDGVKKLNLYLIINYFKGGKLRFKKIKPEAFEANRFYTVINKKSGEIVPMEVNFNFDDPNLIILPLAFGKRQGREFIWNDLLSLETGSLKLANGRVIEKTLYNRRTRQDEPALFVALTFERREVLDSSNIKPMNLIGVDRGENIPAVIALTDPEGCPLSRFKDSLGNPTHILRIGESYKEKQRTIQAKKEVEQRRAGGYSRKYASKAKNLADDMVRNTARDLLYYAVTQDAMLIFENLSRGFGRQGKRTFMAERQYTRMEDWLTAKLAYEGLPSKTYLSKTLAQYTSKTCSNCGFTITSADYDRVLEKLKKTATGWMTTINGKELKVEGQITYYNRYKRQNVVKDLSVELDRLSEESVNNDISSWTKGRSGEALSLLKKRFSHRPVQEKFVCLNCGFETHADEQAALNIARSWLFLRSQEYKKYQTNKTTGNTDKRAFVETWQSFYRKKLKEVWKPAV

SEQ ID NO: 43680 - protein, 979 aa, Artificial Sequence
  CasX Variant
QEIKRINKIRRRLVKDSNTKKAGKTGPMKTLLVRVMTPDLRERLENLRKKPENIPQPISNTSRANLNKLLTDYTEMKKAILHVYWEEFQKDPVGLMSRVAQPASKKIDQNKLKPEMDEKGNLTTAGFACSQCGQPLFVYKLEQVSEKGKAYTNYFGRCNVAEHEKLILLAQLKPEKDSDEAVTYSLGKFGQRALDFYSIHVTKESTHPVKPLAQIAGNRYASGPVGKALSDACMGTIASFLSKYQDIIIEHQKVVKGNQKRLESLRELAGKENLEYPSVTLPPQPHTKEGVDAYNEVIARVRMWVNLNLWQKLKLSRDDAKPLLRLKGFPSFPLVERQANEVDWWDMVCNVKKLINEKKEDGKVFWQNLAGYKRQEALRPYLFSSEEDRKKGKKFARYQLGDLLLHLEKKHGEDWGKVYDEAWERIDKKVEGLSKHIKLEEERRSEDAQSKAALTDWLRAKASFVIEGLKEADKDEFCRCELKLQKWYGDLRGKPFAIEAENSILDISGFSKQYNCAFIWQKDGVKKLNLYLIINYFKGGKLRFKKIKPEAFEANRFYTVINKKSGEIVPMEVNFNFDDPNLIILPLAFGKRQGREFIWNDLLSLETGSLKLANGRVIEKTLYNRRTRQDEPALFVALTFERREVLDSSNIKPMNLIGVDRGENIPAVIALTDPEGCPLSRFKDSLGNPTHILRIGESYKEKQRTIQAKKEVEQRRAGGYSRKYASKAKNLADDMVRNTARDLLYYAVTQDAMLIFENLSRGFGRQGKRTFMAERQYTRMEDWLTAKLAYEGLPSKTYLSKTLAQYTSKTCSNCGFTITSADYDRVLEKLKKTATGWMTTINGKELKVEGQITYYNRYKRQNVVKDLSVELDRLSEESVNNDISSWTKGRSGEALSLLKKRFSHRPVQEKFVCLNCGFETHADEQAALNIARSWLFLRSQEYKKYQTNKTTGNTDKRAFVETWQSFYRKKLKEVWKPAV

SEQ ID NO: 43681 - protein, 979 aa, Artificial Sequence
  CasX Variant
QEIKRINKIRRRLVKDSNTKKAGKTGPMKTLLVRVMTPDLRERLENLRKKPENIPQPISNTSRANLNKLLTDYTEMKKAILHVYWEEFQKDPVGLMSRVAQPASKKIDQNKLKPEMDEKGNLTTAGFACSQCGQPLFVYKWLEQVSEKGKAYTNYFGRCNVAEHEKLILLAQLKPEKDSDEAVTYSLGKFGQRALDFYSIHVTKESTHPVKPLAQIAGNRYASGPVGKALSDACMGTIASFLSKYQDIIIEHQKVVKGNQKRLESLRELAGKENLEYPSVTLPPQPHTKEGVDAYNEVIARVRMWVNLNLWQKLKLSRDDAKPLLRLKGFPSFPLVERQANEVDWWDMVCNVKKLINEKKEDGKVFWQNLAGYKRQEALRPYLSSEEDRKKGKKFARYQLGDLLLHLEKKHGEDWGKVYDEAWERIDKKVEGLSKHIKLEEERRSEDAQSKAALTDWLRAKASFVIEGLKEADKDEFCRCELKLQKWYGDLRGKPFAIEAENSILDISGFSKQYNCAFIWQKDGVKKLNLYLIINYFKGGKLRFKKIKPEAFEANRFYTVINKKSGEIVPMEVNFNFDDPNLIILPLAFGKRQGREFIWNDLLSLETGSLKLANGRVIEKTLYNRRTRQDEPALFVALTFERREVLDSSNIKPMNLIGVDRGENIPAVIALTDPEGCPLSRFKDSLGNPTHILRIGESYKEKQRTIQAKKEVEQRRAGGYSRKYASKAKNLADDMVRNTARDLLYYAVTQDAMLIFENLSRGFGRQGKRTFMAERQYTRMEDWLTAKLAYEGLPSKTYLSKTLAQYTSKTCSNCGFTITSADYDRVLEKLKKTATGWMTTINGKELKVEGQITYYNRYKRQNVVKDLSVELDRLSEESVNNDISSWTKGRSGEALSLLKKRFSHRPVQEKFVCLNCGFETHADEQAALNIARSWLFLRSQEYKKYQTNKTTGNTDKRAFVETWQSFYRKKLKEVWKPAV

SEQ ID NO: 43682 - protein, 978 aa, Artificial Sequence
  CasX Variant
QEIKRINKIRRRLVKDSNTKKAGKTGPMKTLLVRVMTPDLRERLENLRKKPENIPQPISNTSRANLNKLLTDYTEMKKAILHVYWEEFQKDPVGLMSRVAQPASKKIDQNKLKPEMDEKGNLTTAGFACSQCGQPLFVYKLEQVSEKGKAYTNYFGRCNVAEHEKLILLAQLKPEKDSDEAVTYSLGKFGQRALDFYSIHVTKESTHPVKPLAQIAGNRYASGPVGKALSDACMGTIASFLSKYQDIIIEHQKVVKGNQKRLESLRELAGKENLEYPSVTLPPQPHTKEGVDAYNEVIARVRMWVNDNLWQKLKLSRDDAKPLLRLKGFPSFPLVERQANEVDWWDMVCNVKKLINEKKEDGKVFWQNLAGYKRQEALRPYLSSEEDRKKGKKFARYQLGDLLLHLEKKHGEDWGKVYDEAWERIDKKVEGLSKHIKLEEERRSEDAQSKAALTDWLRAKASFVIEGLKEADKDEFCRCELKLQKWYGDLRGKPFAIEAENSILDISGFSKQYNCAFIWQKDGVKKLNLYLIINYFKGGKLRFKKIKPEAFEANRFYTVINKKSGEIVPMEVNFNFDDPNLIILPLAFGKRQGREFIWNDLLSLETGSLKLANGRVIEKTLYNRRTRQDEPALFVALTFERREVLDSSNIKPMNLIGVDRGENIPAVIALTDPEGCPLSRFKDSLGNPTHILRIGESYKEKQRTIQAKKEVEQRRAGGYSRKYASKAKNLADDMVRNTARDLLYYAVTQDAMLIFENLSRGFGRQGKRTFMAERQYTRMEDWLTAKLAYEGLPSKTYLSKTLAQYTSKTCSNCGFTITSADYDRVLEKLKKTATGWMTTINGKELKVEGQITYYNRYKRQNVVKDLSVELDRLSEESVNNDISSWTKGRSGEALSLLKKRFSHRPVQEKFVCLNCGFETHADEQAALNIARSWLFLRSQEYKKYQTNKTTGNTDKRAFVETWQSFYRKKLKEVWKPAV

SEQ ID NO: 43683 - protein, 978 aa, Artificial Sequence
  CasX Variant
QEIKRINKIRRRLVKDSNTKKAGKTGPMKTLLVRVMTPDLRERLENLRKKPENIPQPISNTSRANLNKLLTDYTEMKKAILHVYWEEFQKDPVGLMSRVAQPASKKIDQNKLKPEMDEKGNLTTAGFACSQCGQPLFVYKLEQVSEKGKAYTNYFGRCNVAEHEKLILLAQLKPEKDSDEAVTYSLGKFGQRALDFYSIHVTKESTHPVKPLAQIAGNRYASGPVGKALSDACMGTIASFLSKYQDIIIEHQKVVKGNQKRLESLRELAGKENLEYPSVTLPPQPHTKEGVDAYNEVIARVRMWVNLNLWQKLKLSRDDAKPLLRLKGFPSFPLVERQANEVDWWDMVCNVKKLINEKKEDGKVFWQNLAGYKRQEALRPYLSSEEDRKKGKKFARYQLGDLLLHLEKKHGEDWGKVYDEAWERIDKKVEGLSKHIKLEEERRSEDAQSKAALTDWLRAKASFVIEGLKEADKDEFCRCELKLQKWYGDLRGKPFAIEAENSILDISGFSTQYNCAFIWQKDGVKKLNLYLIINYFKGGKLRFKKIKPEAFEANRFYTVINKKSGEIVPMEVNFNFDDPNLIILPLAFGKRQGREFIWNDLLSLETGSLKLANGRVIEKTLYNRRTRQDEPALFVALTFERREVLDSSNIKPMNLIGVDRGENIPAVIALTDPEGCPLSRFKDSLGNPTHILRIGESYKEKQRTIQAKKEVEQRRAGGYSRKYASKAKNLADDMVRNTARDLLYYAVTQDAMLIFENLSRGFGRQGKRTFMAERQYTRMEDWLTAKLAYEGLPSKTYLSKTLAQYTSKTCSNCGFTITSADYDRVLEKLKKTATGWMTTINGKELKVEGQITYYNRYKRQNVVKDLSVELDRLSEESVNNDISSWTKGRSGEALSLLKKRFSHRPVQEKFVCLNCGFETHADEQAALNIARSWLFLRSQEYKKYQTNKTTGNTDKRAFVETWQSFYRKKLKEVWKPAV

SEQ ID NO: 43684 - protein, 978 aa, Artificial Sequence
  CasX Variant
QEIKRINKIRRRLVKDSNTKKAGKTGPMKTLLVRVMTPDLRERLENLRKKPENIPQPISNTSRANLNKLLTDYTEMKKAILHVYWEEFQKDPVGLMSRVAQPASKKIDQNKLKPEMDEKGNLTTAGFACSQCGQPLFVYKLEQVSEKGKAYTNYFGRCNVAEHEKLILLDQLKPEKDSDEAVTYSLGKFGQRALDFYSIHVTKESTHPVKPLAQIAGNRYASGPVGKALSDACMGTIASFLSKYQDIIIEHQKVVKGNQKRLESLRELAGKENLEYPSVTLPPQPHTKEGVDAYNEVIARVRMWVNLNLWQKLKLSRDDAKPLLRLKGFPSFPLVERQANEVDWWDMVCNVKKLINEKKEDGKVFWQNLAGYKRQEALRPYLSSEEDRKKGKKFARYQLGDLLLHLEKKHGEDWGKVYDEAWERIDKKVEGLSKHIKLEEERRSEDAQSKAALTDWLRAKASFVIEGLKEADKDEFCRCELKLQKWYGDLRGKPFAIEAENSILDISGFSKQYNCAFIWQKDGVKKLNLYLIINYFKGGKLRFKKIKPEAFEANRFYTVINKKSGEIVPMEVNFNFDDPNLIILPLAFGKRQGREFIWNDLLSLETGSLKLANGRVIEKTLYNRRTRQDEPALFVALTFERREVLDSSNIKPMNLIGVDRGENIPAVIALTDPEGCPLSRFKDSLGNPTHILRIGESYKEKQRTIQAKKEVEQRRAGGYSRKYASKAKNLADDMVRNTARDLLYYAVTQDAMLIFENLSRGFGRQGKRTFMAERQYTRMEDWLTAKLAYEGLPSKTYLSKTLAQYTSKTCSNCGFTITSADYDRVLEKLKKTATGWMTTINGKELKVEGQITYYNRYKRQNVVKDLSVELDRLSEESVNNDISSWTKGRSGEALSLLKKRFSHRPVQEKFVCLNCGFETHADEQAALNIARSWLFLRSQEYKKYQTNKTTGNTDKRAFVETWQSFYRKKLKEVWKPAV

SEQ ID NO: 43685 - protein, 978 aa, Artificial Sequence
  CasX Variant
QEIKRINKIRRRLVKDSNTKKAGKTGPMKTLLVRVMTPDLRERLENLRKKPENIPQPISNTSRANLNKLLTDYTEMKKAILHVYWEEFQKDPVGLMSRVAQPASKKIDQNKLKPEMDEKGNLTTAGFACSQCGQPLFVYKLEQVSEKGKAYTNYFGRCNVAEHEKLIPLAQLKPEKDSDEAVTYSLGKFGQRALDFYSIHVTKESTHPVKPLAQIAGNRYASGPVGKALSDACMGTIASFLSKYQDIIIEHQKVVKGNQKRLESLRELAGKENLEYPSVTLPPQPHTKEGVDAYNEVIARVRMWVNLNLWQKLKLSRDDAKPLLRLKGFPSFPLVERQANEVDWWDMVCNVKKLINEKKEDGKVFWQNLAGYKRQEALRPYLSSEEDRKKGKKFARYQLGDLLLHLEKKHGEDWGKVYDEAWERIDKKVEGLSKHIKLEEERRSEDAQSKAALTDWLRAKASFVIEGLKEADKDEFCRCELKLQKWYGDLRGKPFAIEAENSILDISGFSKQYNCAFIWQKDGVKKLNLYLIINYFKGGKLRFKKIKPEAFEANRFYTVINKKSGEIVPMEVNFNFDDPNLIILPLAFGKRQGREFIWNDLLSLETGSLKLANGRVIEKTLYNRRTRQDEPALFVALTFERREVLDSSNIKPMNLIGVDRGENIPAVIALTDPEGCPLSRFKDSLGNPTHILRIGESYKEKQRTIQAKKEVEQRRAGGYSRKYASKAKNLADDMVRNTARDLLYYAVTQDAMLIFENLSRGFGRQGKRTFMAERQYTRMEDWLTAKLAYEGLPSKTYLSKTLAQYTSKTCSNCGFTITSADYDRVLEKLKKTATGWMTTINGKELKVEGQITYYNRYKRQNVVKDLSVELDRLSEESVNNDISSWTKGRSGEALSLLKKRFSHRPVQEKFVCLNCGFETHADEQAALNIARSWLFLRSQEYKKYQTNKTTGNTDKRAFVETWQSFYRKKLKEVWKPAV

SEQ ID NO: 43686 - protein, 978 aa, Artificial Sequence
  CasX Variant
QEIKRINKIRRRLVKDSNTKKAGKTGPMKTLLVRVMTPDLRERLENLRKKPENIPQPISNTSRANLNKLLTDYTEMKKAILHVYWEEFQKDPVGLMSRVAQPASKKIDQNKLKPEMDEKGNLTTAGFACSQCGQPLFVYKLEQVSEKGKAYTNYFGRCNVAEHEKLILLAQLKPEKDSDEAVTYSLGKFGQRALDFYSIHVTKESTHPVKPLAQIAGNRYASGPVGKALSDACMGTIASFLSKYQDIIIEHQKVVKGNQKRLESLRELAGKENLEYPSVTLPPQPHTKEGVDAYNEVIARVRMWVNLNLWQKLKLSRDDAKPLLRLKGFPSFPLVERQANEVDWWDMVCNVKKLINEKKEDGKVFWQNLAGYKRQEALRPYLSSEEDRKKGKKFARYQLGDLLLHLEKKHGEDWGKVYDEAWERIDKKVEGLSKHIKLEEERRSEDAQSKAALTDWLRAKASFVIEGLKEADKDEFCRCELKLQKWYGDLRGKPFAIEAENSILDISGFSKQYNCAFIWQKDGVKKLNLYLIINYFKGGKLRFKKIKPEAFEANRFYTVINKKSGEIVPMEVNFNFDDPNLIILPLAFGKRQGREFIWNDLLSLETGSLKLANGRVIEKTLYNRRTRQDEPALFVALTFERREVLDSSNIKPMNLIGVDRGENIPAVIALTDPEGCPLSRFKDSLGNPTHILRIGESYKEKQRTIQAKKEVEQRRAGGYSRKYASKAKNLADDMVRNTARDLLYYAVTQDAMLIFENLSRGFGRQGKRTFMAERQYTRMEDWLTAKKAYEGLPSKTYLSKTLAQYTSKTCSNCGFTITSADYDRVLEKLKKTATGWMTTINGKELKVEGQITYYNRYKRQNVVKDLSVELDRLSEESVNNDISSWTKGRSGEALSLLKKRFSHRPVQEKFVCLNCGFETHADEQAALNIARSWLFLRSQEYKKYQTNKTTGNTDKRAFVETWQSFYRKKLKEVWKPAV

SEQ ID NO: 43687 - protein, 978 aa, Artificial Sequence
  CasX Variant
QEIKRINKIRRRLVKDSNTKKAGKTGPMKTLLVRVMTPDLRERLENLRKKPENIPQPISNTSRANLNKLLTDYTEMKKAILHVYWEEFQKDPVGLMSRVAQPASKKIDQNKLKPEMDEKGNLTTAGFACSQCGQPLFVYKLEQVSEKGKAYTNYFGRCNVAEHEKLILLAQLKPEKDSDEAVTYSLGKFGQRALDFYSIHVTKESTHPVKPLAQIAGNRYASGPVGKALSDACMGTIASFLSKYQDIIIEHQKVVKGNQKRLESLRELAGKENLEYPSVTLPPQPHTKEGVDAYNEVIARVRMWVNLNLWQKLKLSRDDAKPLLRLKGFPSFPLVERQANEVDWWDMVCNVKKLINEKKEDGKVFWQNLAGYKRQEALRPYLSSEEDRKKGKKFARYQLGDLLLHLEKKHGEDWGKVYDEAWERIDKKVEGLSKHIKLEEERRSEDAQSKAALTDWLRAKASFVIEGLKEADKDEFCRCELKLQKWYGDLRGKPFAIEAENSILDISGFSKQYNCAFIWQKDGVKKLNLYLIINYFKGGKLRFKKIKPEAFEANRFYTVINKKSGEIVPMEVNFNFDDPNLIILPLAFGKRQGREFIWNDLLSLETGSLKLANGRVIEKTLYNRRTRQDEPALFVALTFERREVLDSSNIKPMNLIGVDRGENIPAVIALTDPEGCPLSRFKDSLGNPTHILRIGESYKEKQRTIQAKKEVEQRRAGGYSRKYASKAKNLADDMVRNTARDLLYYAVTQDAMLIFENLSRGFGRQGKRTFMAERQYTRMEDWLTAKLKYEGLPSKTYLSKTLAQYTSKTCSNCGFTITSADYDRVLEKLKKTATGWMTTINGKELKVEGQITYYNRYKRQNVVKDLSVELDRLSEESVNNDISSWTKGRSGEALSLLKKRFSHRPVQEKFVCLNCGFETHADEQAALNIARSWLFLRSQEYKKYQTNKTTGNTDKRAFVETWQSFYRKKLKEVWKPAV

SEQ ID NO: 43688 - protein, 978 aa, Artificial Sequence
  CasX Variant
QEGKRINKIRRRLVKDSNTKKAGKTGPMKTLLVRVMTPDLRERLENLRKKPENIPQPISNTSRANLNKLLTDYTEMKKAILHVYWEEFQKDPVGLMSRVAQPASKKIDQNKLKPEMDEKGNLTTAGFACSQCGQPLFVYKLEQVSEKGKAYTNYFGRCNVAEHEKLILLAQLKPEKDSDEAVTYSLGKFGQRALDFYSIHVTKESTHPVKPLAQIAGNRYASGPVGKALSDACMGTIASFLSKYQDIIIEHQKVVKGNQKRLESLRELAGKENLEYPSVTLPPQPHTKEGVDAYNEVIARVRMWVNLNLWQKLKLSRDDAKPLLRLKGFPSFPLVERQANEVDWWDMVCNVKKLINEKKEDGKVFWQNLAGYKRQEALRPYLSSEEDRKKGKKFARYQLGDLLLHLEKKHGEDWGKVYDEAWERIDKKVEGLSKHIKLEEERRSEDAQSKAALTDWLRAKASFVIEGLKEADKDEFCRCELKLQKWYGDLRGKPFAIEAENSILDISGFSKQYNCAFIWQKDGVKKLNLYLIINYFKGGKLRFKKIKPEAFEANRFYTVINKKSGEIVPMEVNFNFDDPNLIILPLAFGKRQGREFIWNDLLSLETGSLKLANGRVIEKTLYNRRTRQDEPALFVALTFERREVLDSSNIKPMNLIGVDRGENIPAVIALTDPEGCPLSRFKDSLGNPTHILRIGESYKEKQRTIQAKKEVEQRRAGGYSRKYASKAKNLADDMVRNTARDLLYYAVTQDAMLIFENLSRGFGRQGKRTFMAERQYTRMEDWLTAKLAYEGLPSKTYLSKTLAQYTSKTCSNCGFTITSADYDRVLEKLKKTATGWMTTINGKELKVEGQITYYNRYKRQNVVKDLSVELDRLSEESVNNDISSWTKGRSGEALSLLKKRFSHRPVQEKFVCLNCGFETHADEQAALNIARSWLFLRSQEYKKYQTNKTTGNTDKRAFVETWQSFYRKKLKEVWKPAV

SEQ ID NO: 43689 - protein, 978 aa, Artificial Sequence
  CasX Variant
QEEKRINKIRRRLVKDSNTKKAGKTGPMKTLLVRVMTPDLRERLENLRKKPENIPQPISNTSRANLNKLLTDYTEMKKAILHVYWEEFQKDPVGLMSRVAQPASKKIDQNKLKPEMDEKGNLTTAGFACSQCGQPLFVYKLEQVSEKGKAYTNYFGRCNVAEHEKLILLAQLKPEKDSDEAVTYSLGKFGQRALDFYSIHVTKESTHPVKPLAQIAGNRYASGPVGKALSDACMGTIASFLSKYQDIIIEHQKVVKGNQKRLESLRELAGKENLEYPSVTLPPQPHTKEGVDAYNEVIARVRMWVNLNLWQKLKLSRDDAKPLLRLKGFPSFPLVERQANEVDWWDMVCNVKKLINEKKEDGKVFWQNLAGYKRQEALRPYLSSEEDRKKGKKFARYQLGDLLLHLEKKHGEDWGKVYDEAWERIDKKVEGLSKHIKLEEERRSEDAQSKAALTDWLRAKASFVIEGLKEADKDEFCRCELKLQKWYGDLRGKPFAIEAENSILDISGFSKQYNCAFIWQKDGVKKLNLYLIINYFKGGKLRFKKIKPEAFEANRFYTVINKKSGEIVPMEVNFNFDDPNLIILPLAFGKRQGREFIWNDLLSLETGSLKLANGRVIEKTLYNRRTRQDEPALFVALTFERREVLDSSNIKPMNLIGVDRGENIPAVIALTDPEGCPLSRFKDSLGNPTHILRIGESYKEKQRTIQAKKEVEQRRAGGYSRKYASKAKNLADDMVRNTARDLLYYAVTQDAMLIFENLSRGFGRQGKRTFMAERQYTRMEDWLTAKLAYEGLPSKTYLSKTLAQYTSKTCSNCGFTITSADYDRVLEKLKKTATGWMTTINGKELKVEGQITYYNRYKRQNVVKDLSVELDRLSEESVNNDISSWTKGRSGEALSLLKKRFSHRPVQEKFVCLNCGFETHADEQAALNIARSWLFLRSQEYKKYQTNKTTGNTDKRAFVETWQSFYRKKLKEVWKPAV

SEQ ID NO: 43690 - protein, 979 aa, Artificial Sequence
  CasX Variant
QEIGKRINKIRRRLVKDSNTKKAGKTGPMKTLLVRVMTPDLRERLENLRKKPENIPQPISNTSRANLNKLLTDYTEMKKAILHVYWEEFQKDPVGLMSRVAQPASKKIDQNKLKPEMDEKGNLTTAGFACSQCGQPLFVYKLEQVSEKGKAYTNYFGRCNVAEHEKLILLAQLKPEKDSDEAVTYSLGKFGQRALDFYSIHVTKESTHPVKPLAQIAGNRYASGPVGKALSDACMGTIASFLSKYQDIIIEHQKVVKGNQKRLESLRELAGKENLEYPSVTLPPQPHTKEGVDAYNEVIARVRMWVNLNLWQKLKLSRDDAKPLLRLKGFPSFPLVERQANEVDWWDMVCNVKKLINEKKEDGKVFWQNLAGYKRQEALRPYLSSEEDRKKGKKFARYQLGDLLLHLEKKHGEDWGKVYDEAWERIDKKVEGLSKHIKLEEERRSEDAQSKAALTDWLRAKASFVIEGLKEADKDEFCRCELKLQKWYGDLRGKPFAIEAENSILDISGFSKQYNCAFIWQKDGVKKLNLYLIINYFKGGKLRFKKIKPEAFEANRFYTVINKKSGEIVPMEVNFNFDDPNLIILPLAFGKRQGREFIWNDLLSLETGSLKLANGRVIEKTLYNRRTRQDEPALFVALTFERREVLDSSNIKPMNLIGVDRGENIPAVIALTDPEGCPLSRFKDSLGNPTHILRIGESYKEKQRTIQAKKEVEQRRAGGYSRKYASKAKNLADDMVRNTARDLLYYAVTQDAMLIFENLSRGFGRQGKRTFMAERQYTRMEDWLTAKLAYEGLPSKTYLSKTLAQYTSKTCSNCGFTITSADYDRVLEKLKKTATGWMTTINGKELKVEGQITYYNRYKRQNVVKDLSVELDRLSEESVNNDISSWTKGRSGEALSLLKKRFSHRPVQEKFVCLNCGFETHADEQAALNIARSWLFLRSQEYKKYQTNKTTGNTDKRAFVETWQSFYRKKLKEVWKPAV

SEQ ID NO: 43691 - protein, 978 aa, Artificial Sequence
  CasX Variant
QEIGRINKIRRRLVKDSNTKKAGKTGPMKTLLVRVMTPDLRERLENLRKKPENIPQPISNTSRANLNKLLTDYTEMKKAILHVYWEEFQKDPVGLMSRVAQPASKKIDQNKLKPEMDEKGNLTTAGFACSQCGQPLFVYKLEQVSEKGKAYTNYFGRCNVAEHEKLILLAQLKPEKDSDEAVTYSLGKFGQRALDFYSIHVTKESTHPVKPLAQIAGNRYASGPVGKALSDACMGTIASFLSKYQDIIIEHQKVVKGNQKRLESLRELAGKENLEYPSVTLPPQPHTKEGVDAYNEVIARVRMWVNLNLWQKLKLSRDDAKPLLRLKGFPSFPLVERQANEVDWWDMVCNVKKLINEKKEDGKVFWQNLAGYKRQEALRPYLSSEEDRKKGKKFARYQLGDLLLHLEKKHGEDWGKVYDEAWERIDKKVEGLSKHIKLEEERRSEDAQSKAALTDWLRAKASFVIEGLKEADKDEFCRCELKLQKWYGDLRGKPFAIEAENSILDISGFSKQYNCAFIWQKDGVKKLNLYLIINYFKGGKLRFKKIKPEAFEANRFYTVINKKSGEIVPMEVNFNFDDPNLIILPLAFGKRQGREFIWNDLLSLETGSLKLANGRVIEKTLYNRRTRQDEPALFVALTFERREVLDSSNIKPMNLIGVDRGENIPAVIALTDPEGCPLSRFKDSLGNPTHILRIGESYKEKQRTIQAKKEVEQRRAGGYSRKYASKAKNLADDMVRNTARDLLYYAVTQDAMLIFENLSRGFGRQGKRTFMAERQYTRMEDWLTAKLAYEGLPSKTYLSKTLAQYTSKTCSNCGFTITSADYDRVLEKLKKTATGWMTTINGKELKVEGQITYYNRYKRQNVVKDLSVELDRLSEESVNNDISSWTKGRSGEALSLLKKRFSHRPVQEKFVCLNCGFETHADEQAALNIARSWLFLRSQEYKKYQTNKTTGNTDKRAFVETWQSFYRKKLKEVWKPAV

SEQ ID NO: 43692 - protein, 978 aa, Artificial Sequence
  CasX Variant
QEISRINKIRRRLVKDSNTKKAGKTGPMKTLLVRVMTPDLRERLENLRKKPENIPQPISNTSRANLNKLLTDYTEMKKAILHVYWEEFQKDPVGLMSRVAQPASKKIDQNKLKPEMDEKGNLTTAGFACSQCGQPLFVYKLEQVSEKGKAYTNYFGRCNVAEHEKLILLAQLKPEKDSDEAVTYSLGKFGQRALDFYSIHVTKESTHPVKPLAQIAGNRYASGPVGKALSDACMGTIASFLSKYQDIIIEHQKVVKGNQKRLESLRELAGKENLEYPSVTLPPQPHTKEGVDAYNEVIARVRMWVNLNLWQKLKLSRDDAKPLLRLKGFPSFPLVERQANEVDWWDMVCNVKKLINEKKEDGKVFWQNLAGYKRQEALRPYLSSEEDRKKGKKFARYQLGDLLLHLEKKHGEDWGKVYDEAWERIDKKVEGLSKHIKLEEERRSEDAQSKAALTDWLRAKASFVIEGLKEADKDEFCRCELKLQKWYGDLRGKPFAIEAENSILDISGFSKQYNCAFIWQKDGVKKLNLYLIINYFKGGKLRFKKIKPEAFEANRFYTVINKKSGEIVPMEVNFNFDDPNLIILPLAFGKRQGREFIWNDLLSLETGSLKLANGRVIEKTLYNRRTRQDEPALFVALTFERREVLDSSNIKPMNLIGVDRGENIPAVIALTDPEGCPLSRFKDSLGNPTHILRIGESYKEKQRTIQAKKEVEQRRAGGYSRKYASKAKNLADDMVRNTARDLLYYAVTQDAMLIFENLSRGFGRQGKRTFMAERQYTRMEDWLTAKLAYEGLPSKTYLSKTLAQYTSKTCSNCGFTITSADYDRVLEKLKKTATGWMTTINGKELKVEGQITYYNRYKRQNVVKDLSVELDRLSEESVNNDISSWTKGRSGEALSLLKKRFSHRPVQEKFVCLNCGFETHADEQAALNIARSWLFLRSQEYKKYQTNKTTGNTDKRAFVETWQSFYRKKLKEVWKPAV

SEQ ID NO: 43693 - protein, 979 aa, Artificial Sequence
  CasX Variant
QEIKGRINKIRRRLVKDSNTKKAGKTGPMKTLLVRVMTPDLRERLENLRKKPENIPQPISNTSRANLNKLLTDYTEMKKAILHVYWEEFQKDPVGLMSRVAQPASKKIDQNKLKPEMDEKGNLTTAGFACSQCGQPLFVYKLEQVSEKGKAYTNYFGRCNVAEHEKLILLAQLKPEKDSDEAVTYSLGKFGQRALDFYSIHVTKESTHPVKPLAQIAGNRYASGPVGKALSDACMGTIASFLSKYQDIIIEHQKVVKGNQKRLESLRELAGKENLEYPSVTLPPQPHTKEGVDAYNEVIARVRMWVNLNLWQKLKLSRDDAKPLLRLKGFPSFPLVERQANEVDWWDMVCNVKKLINEKKEDGKVFWQNLAGYKRQEALRPYLSSEEDRKKGKKFARYQLGDLLLHLEKKHGEDWGKVYDEAWERIDKKVEGLSKHIKLEEERRSEDAQSKAALTDWLRAKASFVIEGLKEADKDEFCRCELKLQKWYGDLRGKPFAIEAENSILDISGFSKQYNCAFIWQKDGVKKLNLYLIINYFKGGKLRFKKIKPEAFEANRFYTVINKKSGEIVPMEVNFNFDDPNLIILPLAFGKRQGREFIWNDLLSLETGSLKLANGRVIEKTLYNRRTRQDEPALFVALTFERREVLDSSNIKPMNLIGVDRGENIPAVIALTDPEGCPLSRFKDSLGNPTHILRIGESYKEKQRTIQAKKEVEQRRAGGYSRKYASKAKNLADDMVRNTARDLLYYAVTQDAMLIFENLSRGFGRQGKRTFMAERQYTRMEDWLTAKLAYEGLPSKTYLSKTLAQYTSKTCSNCGFTITSADYDRVLEKLKKTATGWMTTINGKELKVEGQITYYNRYKRQNVVKDLSVELDRLSEESVNNDISSWTKGRSGEALSLLKKRFSHRPVQEKFVCLNCGFETHADEQAALNIARSWLFLRSQEYKKYQTNKTTGNTDKRAFVETWQSFYRKKLKEVWKPAV

SEQ ID NO: 43694 - protein, 978 aa, Artificial Sequence
  CasX Variant
QEIKSINKIRRRLVKDSNTKKAGKTGPMKTLLVRVMTPDLRERLENLRKKPENIPQPISNTSRANLNKLLTDYTEMKKAILHVYWEEFQKDPVGLMSRVAQPASKKIDQNKLKPEMDEKGNLTTAGFACSQCGQPLFVYKLEQVSEKGKAYTNYFGRCNVAEHEKLILLAQLKPEKDSDEAVTYSLGKFGQRALDFYSIHVTKESTHPVKPLAQIAGNRYASGPVGKALSDACMGTIASFLSKYQDIIIEHQKVVKGNQKRLESLRELAGKENLEYPSVTLPPQPHTKEGVDAYNEVIARVRMWVNLNLWQKLKLSRDDAKPLLRLKGFPSFPLVERQANEVDWWDMVCNVKKLINEKKEDGKVFWQNLAGYKRQEALRPYLSSEEDRKKGKKFARYQLGDLLLHLEKKHGEDWGKVYDEAWERIDKKVEGLSKHIKLEEERRSEDAQSKAALTDWLRAKASFVIEGLKEADKDEFCRCELKLQKWYGDLRGKPFAIEAENSILDISGFSKQYNCAFIWQKDGVKKLNLYLIINYFKGGKLRFKKIKPEAFEANRFYTVINKKSGEIVPMEVNFNFDDPNLIILPLAFGKRQGREFIWNDLLSLETGSLKLANGRVIEKTLYNRRTRQDEPALFVALTFERREVLDSSNIKPMNLIGVDRGENIPAVIALTDPEGCPLSRFKDSLGNPTHILRIGESYKEKQRTIQAKKEVEQRRAGGYSRKYASKAKNLADDMVRNTARDLLYYAVTQDAMLIFENLSRGFGRQGKRTFMAERQYTRMEDWLTAKLAYEGLPSKTYLSKTLAQYTSKTCSNCGFTITSADYDRVLEKLKKTATGWMTTINGKELKVEGQITYYNRYKRQNVVKDLSVELDRLSEESVNNDISSWTKGRSGEALSLLKKRFSHRPVQEKFVCLNCGFETHADEQAALNIARSWLFLRSQEYKKYQTNKTTGNTDKRAFVETWQSFYRKKLKEVWKPAV

SEQ ID NO: 43695 - protein, 978 aa, Artificial Sequence
  CasX Variant
QEIKRANKIRRRLVKDSNTKKAGKTGPMKTLLVRVMTPDLRERLENLRKKPENIPQPISNTSRANLNKLLTDYTEMKKAILHVYWEEFQKDPVGLMSRVAQPASKKIDQNKLKPEMDEKGNLTTAGFACSQCGQPLFVYKLEQVSEKGKAYTNYFGRCNVAEHEKLILLAQLKPEKDSDEAVTYSLGKFGQRALDFYSIHVTKESTHPVKPLAQIAGNRYASGPVGKALSDACMGTIASFLSKYQDIIIEHQKVVKGNQKRLESLRELAGKENLEYPSVTLPPQPHTKEGVDAYNEVIARVRMWVNLNLWQKLKLSRDDAKPLLRLKGFPSFPLVERQANEVDWWDMVCNVKKLINEKKEDGKVFWQNLAGYKRQEALRPYLSSEEDRKKGKKFARYQLGDLLLHLEKKHGEDWGKVYDEAWERIDKKVEGLSKHIKLEEERRSEDAQSKAALTDWLRAKASFVIEGLKEADKDEFCRCELKLQKWYGDLRGKPFAIEAENSILDISGFSKQYNCAFIWQKDGVKKLNLYLIINYFKGGKLRFKKIKPEAFEANRFYTVINKKSGEIVPMEVNFNFDDPNLIILPLAFGKRQGREFIWNDLLSLETGSLKLANGRVIEKTLYNRRTRQDEPALFVALTFERREVLDSSNIKPMNLIGVDRGENIPAVIALTDPEGCPLSRFKDSLGNPTHILRIGESYKEKQRTIQAKKEVEQRRAGGYSRKYASKAKNLADDMVRNTARDLLYYAVTQDAMLIFENLSRGFGRQGKRTFMAERQYTRMEDWLTAKLAYEGLPSKTYLSKTLAQYTSKTCSNCGFTITSADYDRVLEKLKKTATGWMTTINGKELKVEGQITYYNRYKRQNVVKDLSVELDRLSEESVNNDISSWTKGRSGEALSLLKKRFSHRPVQEKFVCLNCGFETHADEQAALNIARSWLFLRSQEYKKYQTNKTTGNTDKRAFVETWQSFYRKKLKEVWKPAV

SEQ ID NO: 43696 - protein, 979 aa, Artificial Sequence
  CasX Variant
QEIKRGINKIRRRLVKDSNTKKAGKTGPMKTLLVRVMTPDLRERLENLRKKPENIPQPISNTSRANLNKLLTDYTEMKKAILHVYWEEFQKDPVGLMSRVAQPASKKIDQNKLKPEMDEKGNLTTAGFACSQCGQPLFVYKLEQVSEKGKAYTNYFGRCNVAEHEKLILLAQLKPEKDSDEAVTYSLGKFGQRALDFYSIHVTKESTHPVKPLAQIAGNRYASGPVGKALSDACMGTIASFLSKYQDIIIEHQKVVKGNQKRLESLRELAGKENLEYPSVTLPPQPHTKEGVDAYNEVIARVRMWVNLNLWQKLKLSRDDAKPLLRLKGFPSFPLVERQANEVDWWDMVCNVKKLINEKKEDGKVFWQNLAGYKRQEALRPYLSSEEDRKKGKKFARYQLGDLLLHLEKKHGEDWGKVYDEAWERIDKKVEGLSKHIKLEEERRSEDAQSKAALTDWLRAKASFVIEGLKEADKDEFCRCELKLQKWYGDLRGKPFAIEAENSILDISGFSKQYNCAFIWQKDGVKKLNLYLIINYFKGGKLRFKKIKPEAFEANRFYTVINKKSGEIVPMEVNFNFDDPNLIILPLAFGKRQGREFIWNDLLSLETGSLKLANGRVIEKTLYNRRTRQDEPALFVALTFERREVLDSSNIKPMNLIGVDRGENIPAVIALTDPEGCPLSRFKDSLGNPTHILRIGESYKEKQRTIQAKKEVEQRRAGGYSRKYASKAKNLADDMVRNTARDLLYYAVTQDAMLIFENLSRGFGRQGKRTFMAERQYTRMEDWLTAKLAYEGLPSKTYLSKTLAQYTSKTCSNCGFTITSADYDRVLEKLKKTATGWMTTINGKELKVEGQITYYNRYKRQNVVKDLSVELDRLSEESVNNDISSWTKGRSGEALSLLKKRFSHRPVQEKFVCLNCGFETHADEQAALNIARSWLFLRSQEYKKYQTNKTTGNTDKRAFVETWQSFYRKKLKEVWKPAV

SEQ ID NO: 43697 - protein, 978 aa, Artificial Sequence
  CasX Variant
QEIKRISKIRRRLVKDSNTKKAGKTGPMKTLLVRVMTPDLRERLENLRKKPENIPQPISNTSRANLNKLLTDYTEMKKAILHVYWEEFQKDPVGLMSRVAQPASKKIDQNKLKPEMDEKGNLTTAGFACSQCGQPLFVYKLEQVSEKGKAYTNYFGRCNVAEHEKLILLAQLKPEKDSDEAVTYSLGKFGQRALDFYSIHVTKESTHPVKPLAQIAGNRYASGPVGKALSDACMGTIASFLSKYQDIIIEHQKVVKGNQKRLESLRELAGKENLEYPSVTLPPQPHTKEGVDAYNEVIARVRMWVNLNLWQKLKLSRDDAKPLLRLKGFPSFPLVERQANEVDWWDMVCNVKKLINEKKEDGKVFWQNLAGYKRQEALRPYLSSEEDRKKGKKFARYQLGDLLLHLEKKHGEDWGKVYDEAWERIDKKVEGLSKHIKLEEERRSEDAQSKAALTDWLRAKASFVIEGLKEADKDEFCRCELKLQKWYGDLRGKPFAIEAENSILDISGFSKQYNCAFIWQKDGVKKLNLYLIINYFKGGKLRFKKIKPEAFEANRFYTVINKKSGEIVPMEVNFNFDDPNLIILPLAFGKRQGREFIWNDLLSLETGSLKLANGRVIEKTLYNRRTRQDEPALFVALTFERREVLDSSNIKPMNLIGVDRGENIPAVIALTDPEGCPLSRFKDSLGNPTHILRIGESYKEKQRTIQAKKEVEQRRAGGYSRKYASKAKNLADDMVRNTARDLLYYAVTQDAMLIFENLSRGFGRQGKRTFMAERQYTRMEDWLTAKLAYEGLPSKTYLSKTLAQYTSKTCSNCGFTITSADYDRVLEKLKKTATGWMTTINGKELKVEGQITYYNRYKRQNVVKDLSVELDRLSEESVNNDISSWTKGRSGEALSLLKKRFSHRPVQEKFVCLNCGFETHADEQAALNIARSWLFLRSQEYKKYQTNKTTGNTDKRAFVETWQSFYRKKLKEVWKPAV

SEQ ID NO: 43698 - protein, 978 aa, Artificial Sequence
  CasX Variant
QEIKRINGIRRRLVKDSNTKKAGKTGPMKTLLVRVMTPDLRERLENLRKKPENIPQPISNTSRANLNKLLTDYTEMKKAILHVYWEEFQKDPVGLMSRVAQPASKKIDQNKLKPEMDEKGNLTTAGFACSQCGQPLFVYKLEQVSEKGKAYTNYFGRCNVAEHEKLILLAQLKPEKDSDEAVTYSLGKFGQRALDFYSIHVTKESTHPVKPLAQIAGNRYASGPVGKALSDACMGTIASFLSKYQDIIIEHQKVVKGNQKRLESLRELAGKENLEYPSVTLPPQPHTKEGVDAYNEVIARVRMWVNLNLWQKLKLSRDDAKPLLRLKGFPSFPLVERQANEVDWWDMVCNVKKLINEKKEDGKVFWQNLAGYKRQEALRPYLSSEEDRKKGKKFARYQLGDLLLHLEKKHGEDWGKVYDEAWERIDKKVEGLSKHIKLEEERRSEDAQSKAALTDWLRAKASFVIEGLKEADKDEFCRCELKLQKWYGDLRGKPFAIEAENSILDISGFSKQYNCAFIWQKDGVKKLNLYLIINYFKGGKLRFKKIKPEAFEANRFYTVINKKSGEIVPMEVNFNFDDPNLIILPLAFGKRQGREFIWNDLLSLETGSLKLANGRVIEKTLYNRRTRQDEPALFVALTFERREVLDSSNIKPMNLIGVDRGENIPAVIALTDPEGCPLSRFKDSLGNPTHILRIGESYKEKQRTIQAKKEVEQRRAGGYSRKYASKAKNLADDMVRNTARDLLYYAVTQDAMLIFENLSRGFGRQGKRTFMAERQYTRMEDWLTAKLAYEGLPSKTYLSKTLAQYTSKTCSNCGFTITSADYDRVLEKLKKTATGWMTTINGKELKVEGQITYYNRYKRQNVVKDLSVELDRLSEESVNNDISSWTKGRSGEALSLLKKRFSHRPVQEKFVCLNCGFETHADEQAALNIARSWLFLRSQEYKKYQTNKTTGNTDKRAFVETWQSFYRKKLKEVWKPAV

SEQ ID NO: 43699 - protein, 979 aa, Artificial Sequence
  CasX Variant
QEIKRINKIRRRLVKFDSNTKKAGKTGPMKTLLVRVMTPDLRERLENLRKKPENIPQPISNTSRANLNKLLTDYTEMKKAILHVYWEEFQKDPVGLMSRVAQPASKKIDQNKLKPEMDEKGNLTTAGFACSQCGQPLFVYKLEQVSEKGKAYTNYFGRCNVAEHEKLILLAQLKPEKDSDEAVTYSLGKFGQRALDFYSIHVTKESTHPVKPLAQIAGNRYASGPVGKALSDACMGTIASFLSKYQDIIIEHQKVVKGNQKRLESLRELAGKENLEYPSVTLPPQPHTKEGVDAYNEVIARVRMWVNLNLWQKLKLSRDDAKPLLRLKGFPSFPLVERQANEVDWWDMVCNVKKLINEKKEDGKVFWQNLAGYKRQEALRPYLSSEEDRKKGKKFARYQLGDLLLHLEKKHGEDWGKVYDEAWERIDKKVEGLSKHIKLEEERRSEDAQSKAALTDWLRAKASFVIEGLKEADKDEFCRCELKLQKWYGDLRGKPFAIEAENSILDISGFSKQYNCAFIWQKDGVKKLNLYLIINYFKGGKLRFKKIKPEAFEANRFYTVINKKSGEIVPMEVNFNFDDPNLIILPLAFGKRQGREFIWNDLLSLETGSLKLANGRVIEKTLYNRRTRQDEPALFVALTFERREVLDSSNIKPMNLIGVDRGENIPAVIALTDPEGCPLSRFKDSLGNPTHILRIGESYKEKQRTIQAKKEVEQRRAGGYSRKYASKAKNLADDMVRNTARDLLYYAVTQDAMLIFENLSRGFGRQGKRTFMAERQYTRMEDWLTAKLAYEGLPSKTYLSKTLAQYTSKTCSNCGFTITSADYDRVLEKLKKTATGWMTTINGKELKVEGQITYYNRYKRQNVVKDLSVELDRLSEESVNNDISSWTKGRSGEALSLLKKRFSHRPVQEKFVCLNCGFETHADEQAALNIARSWLFLRSQEYKKYQTNKTTGNTDKRAFVETWQSFYRKKLKEVWKPAV

SEQ ID NO: 43700 - protein, 979 aa, Artificial Sequence
  CasX Variant
QEIKRINKIRRRLVKDSFNTKKAGKTGPMKTLLVRVMTPDLRERLENLRKKPENIPQPISNTSRANLNKLLTDYTEMKKAILHVYWEEFQKDPVGLMSRVAQPASKKIDQNKLKPEMDEKGNLTTAGFACSQCGQPLFVYKLEQVSEKGKAYTNYFGRCNVAEHEKLILLAQLKPEKDSDEAVTYSLGKFGQRALDFYSIHVTKESTHPVKPLAQIAGNRYASGPVGKALSDACMGTIASFLSKYQDIIIEHQKVVKGNQKRLESLRELAGKENLEYPSVTLPPQPHTKEGVDAYNEVIARVRMWVNLNLWQKLKLSRDDAKPLLRLKGFPSFPLVERQANEVDWWDMVCNVKKLINEKKEDGKVFWQNLAGYKRQEALRPYLSSEEDRKKGKKFARYQLGDLLLHLEKKHGEDWGKVYDEAWERIDKKVEGLSKHIKLEEERRSEDAQSKAALTDWLRAKASFVIEGLKEADKDEFCRCELKLQKWYGDLRGKPFAIEAENSILDISGFSKQYNCAFIWQKDGVKKLNLYLIINYFKGGKLRFKKIKPEAFEANRFYTVINKKSGEIVPMEVNFNFDDPNLIILPLAFGKRQGREFIWNDLLSLETGSLKLANGRVIEKTLYNRRTRQDEPALFVALTFERREVLDSSNIKPMNLIGVDRGENIPAVIALTDPEGCPLSRFKDSLGNPTHILRIGESYKEKQRTIQAKKEVEQRRAGGYSRKYASKAKNLADDMVRNTARDLLYYAVTQDAMLIFENLSRGFGRQGKRTFMAERQYTRMEDWLTAKLAYEGLPSKTYLSKTLAQYTSKTCSNCGFTITSADYDRVLEKLKKTATGWMTTINGKELKVEGQITYYNRYKRQNVVKDLSVELDRLSEESVNNDISSWTKGRSGEALSLLKKRFSHRPVQEKFVCLNCGFETHADEQAALNIARSWLFLRSQEYKKYQTNKTTGNTDKRAFVETWQSFYRKKLKEVWKPAV

SEQ ID NO: 43701 - protein, 978 aa, Artificial Sequence
  CasX Variant
QEIKRINKIRRRLVKDSNTKKAGKTGPMKTLLVPVMTPDLRERLENLRKKPENIPQPISNTSRANLNKLLTDYTEMKKAILHVYWEEFQKDPVGLMSRVAQPASKKIDQNKLKPEMDEKGNLTTAGFACSQCGQPLFVYKLEQVSEKGKAYTNYFGRCNVAEHEKLILLAQLKPEKDSDEAVTYSLGKFGQRALDFYSIHVTKESTHPVKPLAQIAGNRYASGPVGKALSDACMGTIASFLSKYQDIIIEHQKVVKGNQKRLESLRELAGKENLEYPSVTLPPQPHTKEGVDAYNEVIARVRMWVNLNLWQKLKLSRDDAKPLLRLKGFPSFPLVERQANEVDWWDMVCNVKKLINEKKEDGKVFWQNLAGYKRQEALRPYLSSEEDRKKGKKFARYQLGDLLLHLEKKHGEDWGKVYDEAWERIDKKVEGLSKHIKLEEERRSEDAQSKAALTDWLRAKASFVIEGLKEADKDEFCRCELKLQKWYGDLRGKPFAIEAENSILDISGFSKQYNCAFIWQKDGVKKLNLYLIINYFKGGKLRFKKIKPEAFEANRFYTVINKKSGEIVPMEVNFNFDDPNLIILPLAFGKRQGREFIWNDLLSLETGSLKLANGRVIEKTLYNRRTRQDEPALFVALTFERREVLDSSNIKPMNLIGVDRGENIPAVIALTDPEGCPLSRFKDSLGNPTHILRIGESYKEKQRTIQAKKEVEQRRAGGYSRKYASKAKNLADDMVRNTARDLLYYAVTQDAMLIFENLSRGFGRQGKRTFMAERQYTRMEDWLTAKLAYEGLPSKTYLSKTLAQYTSKTCSNCGFTITSADYDRVLEKLKKTATGWMTTINGKELKVEGQITYYNRYKRQNVVKDLSVELDRLSEESVNNDISSWTKGRSGEALSLLKKRFSHRPVQEKFVCLNCGFETHADEQAALNIARSWLFLRSQEYKKYQTNKTTGNTDKRAFVETWQSFYRKKLKEVWKPAV

SEQ ID NO: 43702 - protein, 978 aa, Artificial Sequence
  CasX Variant
QEIKRINKIRRRLVKDSNTKKAGKTGPMKTLLVRVMTPDLRERLENLRKKPPNIPQPISNTSRANLNKLLTDYTEMKKAILHVYWEEFQKDPVGLMSRVAQPASKKIDQNKLKPEMDEKGNLTTAGFACSQCGQPLFVYKLEQVSEKGKAYTNYFGRCNVAEHEKLILLAQLKPEKDSDEAVTYSLGKFGQRALDFYSIHVTKESTHPVKPLAQIAGNRYASGPVGKALSDACMGTIASFLSKYQDIIIEHQKVVKGNQKRLESLRELAGKENLEYPSVTLPPQPHTKEGVDAYNEVIARVRMWVNLNLWQKLKLSRDDAKPLLRLKGFPSFPLVERQANEVDWWDMVCNVKKLINEKKEDGKVFWQNLAGYKRQEALRPYLSSEEDRKKGKKFARYQLGDLLLHLEKKHGEDWGKVYDEAWERIDKKVEGLSKHIKLEEERRSEDAQSKAALTDWLRAKASFVIEGLKEADKDEFCRCELKLQKWYGDLRGKPFAIEAENSILDISGFSKQYNCAFIWQKDGVKKLNLYLIINYFKGGKLRFKKIKPEAFEANRFYTVINKKSGEIVPMEVNFNFDDPNLIILPLAFGKRQGREFIWNDLLSLETGSLKLANGRVIEKTLYNRRTRQDEPALFVALTFERREVLDSSNIKPMNLIGVDRGENIPAVIALTDPEGCPLSRFKDSLGNPTHILRIGESYKEKQRTIQAKKEVEQRRAGGYSRKYASKAKNLADDMVRNTARDLLYYAVTQDAMLIFENLSRGFGRQGKRTFMAERQYTRMEDWLTAKLAYEGLPSKTYLSKTLAQYTSKTCSNCGFTITSADYDRVLEKLKKTATGWMTTINGKELKVEGQITYYNRYKRQNVVKDLSVELDRLSEESVNNDISSWTKGRSGEALSLLKKRFSHRPVQEKFVCLNCGFETHADEQAALNIARSWLFLRSQEYKKYQTNKTTGNTDKRAFVETWQSFYRKKLKEVWKPAV

SEQ ID NO: 43703 - protein, 979 aa, Artificial Sequence
  CasX Variant
QEIKRINKIRRRLVKDSNTKKAGKTGPMKTLLVRVMTPDLRERLENLRKKPENIPPQPISNTSRANLNKLLTDYTEMKKAILHVYWEEFQKDPVGLMSRVAQPASKKIDQNKLKPEMDEKGNLTTAGFACSQCGQPLFVYKLEQVSEKGKAYTNYFGRCNVAEHEKLILLAQLKPEKDSDEAVTYSLGKFGQRALDFYSIHVTKESTHPVKPLAQIAGNRYASGPVGKALSDACMGTIASFLSKYQDIIIEHQKVVKGNQKRLESLRELAGKENLEYPSVTLPPQPHTKEGVDAYNEVIARVRMWVNLNLWQKLKLSRDDAKPLLRLKGFPSFPLVERQANEVDWWDMVCNVKKLINEKKEDGKVFWQNLAGYKRQEALRPYLSSEEDRKKGKKFARYQLGDLLLHLEKKHGEDWGKVYDEAWERIDKKVEGLSKHIKLEEERRSEDAQSKAALTDWLRAKASFVIEGLKEADKDEFCRCELKLQKWYGDLRGKPFAIEAENSILDISGFSKQYNCAFIWQKDGVKKLNLYLIINYFKGGKLRFKKIKPEAFEANRFYTVINKKSGEIVPMEVNFNFDDPNLIILPLAFGKRQGREFIWNDLLSLETGSLKLANGRVIEKTLYNRRTRQDEPALFVALTFERREVLDSSNIKPMNLIGVDRGENIPAVIALTDPEGCPLSRFKDSLGNPTHILRIGESYKEKQRTIQAKKEVEQRRAGGYSRKYASKAKNLADDMVRNTARDLLYYAVTQDAMLIFENLSRGFGRQGKRTFMAERQYTRMEDWLTAKLAYEGLPSKTYLSKTLAQYTSKTCSNCGFTITSADYDRVLEKLKKTATGWMTTINGKELKVEGQITYYNRYKRQNVVKDLSVELDRLSEESVNNDISSWTKGRSGEALSLLKKRFSHRPVQEKFVCLNCGFETHADEQAALNIARSWLFLRSQEYKKYQTNKTTGNTDKRAFVETWQSFYRKKLKEVWKPAV

SEQ ID NO: 43704 - protein, 978 aa, Artificial Sequence
  CasX Variant
QEIKRINKIRRRLVKDSNTKKAGKTGPMKTLLVRVMTPDLRERLENLRKKPENIPPPISNTSRANLNKLLTDYTEMKKAILHVYWEEFQKDPVGLMSRVAQPASKKIDQNKLKPEMDEKGNLTTAGFACSQCGQPLFVYKLEQVSEKGKAYTNYFGRCNVAEHEKLILLAQLKPEKDSDEAVTYSLGKFGQRALDFYSIHVTKESTHPVKPLAQIAGNRYASGPVGKALSDACMGTIASFLSKYQDIIIEHQKVVKGNQKRLESLRELAGKENLEYPSVTLPPQPHTKEGVDAYNEVIARVRMWVNLNLWQKLKLSRDDAKPLLRLKGFPSFPLVERQANEVDWWDMVCNVKKLINEKKEDGKVFWQNLAGYKRQEALRPYLSSEEDRKKGKKFARYQLGDLLLHLEKKHGEDWGKVYDEAWERIDKKVEGLSKHIKLEEERRSEDAQSKAALTDWLRAKASFVIEGLKEADKDEFCRCELKLQKWYGDLRGKPFAIEAENSILDISGFSKQYNCAFIWQKDGVKKLNLYLIINYFKGGKLRFKKIKPEAFEANRFYTVINKKSGEIVPMEVNFNFDDPNLIILPLAFGKRQGREFIWNDLLSLETGSLKLANGRVIEKTLYNRRTRQDEPALFVALTFERREVLDSSNIKPMNLIGVDRGENIPAVIALTDPEGCPLSRFKDSLGNPTHILRIGESYKEKQRTIQAKKEVEQRRAGGYSRKYASKAKNLADDMVRNTARDLLYYAVTQDAMLIFENLSRGFGRQGKRTFMAERQYTRMEDWLTAKLAYEGLPSKTYLSKTLAQYTSKTCSNCGFTITSADYDRVLEKLKKTATGWMTTINGKELKVEGQITYYNRYKRQNVVKDLSVELDRLSEESVNNDISSWTKGRSGEALSLLKKRFSHRPVQEKFVCLNCGFETHADEQAALNIARSWLFLRSQEYKKYQTNKTTGNTDKRAFVETWQSFYRKKLKEVWKPAV

SEQ ID NO: 43705 - protein, 978 aa, Artificial Sequence
  CasX Variant
QEIKRINKIRRRLVKDSNTKKAGKTGPMKTLLVRVMTPDLRERLENLRKKPENIPQPISNTSSANLNKLLTDYTEMKKAILHVYWEEFQKDPVGLMSRVAQPASKKIDQNKLKPEMDEKGNLTTAGFACSQCGQPLFVYKLEQVSEKGKAYTNYFGRCNVAEHEKLILLAQLKPEKDSDEAVTYSLGKFGQRALDFYSIHVTKESTHPVKPLAQIAGNRYASGPVGKALSDACMGTIASFLSKYQDIIIEHQKVVKGNQKRLESLRELAGKENLEYPSVTLPPQPHTKEGVDAYNEVIARVRMWVNLNLWQKLKLSRDDAKPLLRLKGFPSFPLVERQANEVDWWDMVCNVKKLINEKKEDGKVFWQNLAGYKRQEALRPYLSSEEDRKKGKKFARYQLGDLLLHLEKKHGEDWGKVYDEAWERIDKKVEGLSKHIKLEEERRSEDAQSKAALTDWLRAKASFVIEGLKEADKDEFCRCELKLQKWYGDLRGKPFAIEAENSILDISGFSKQYNCAFIWQKDGVKKLNLYLIINYFKGGKLRFKKIKPEAFEANRFYTVINKKSGEIVPMEVNFNFDDPNLIILPLAFGKRQGREFIWNDLLSLETGSLKLANGRVIEKTLYNRRTRQDEPALFVALTFERREVLDSSNIKPMNLIGVDRGENIPAVIALTDPEGCPLSRFKDSLGNPTHILRIGESYKEKQRTIQAKKEVEQRRAGGYSRKYASKAKNLADDMVRNTARDLLYYAVTQDAMLIFENLSRGFGRQGKRTFMAERQYTRMEDWLTAKLAYEGLPSKTYLSKTLAQYTSKTCSNCGFTITSADYDRVLEKLKKTATGWMTTINGKELKVEGQITYYNRYKRQNVVKDLSVELDRLSEESVNNDISSWTKGRSGEALSLLKKRFSHRPVQEKFVCLNCGFETHADEQAALNIARSWLFLRSQEYKKYQTNKTTGNTDKRAFVETWQSFYRKKLKEVWKPAV

SEQ ID NO: 43706 - protein, 978 aa, Artificial Sequence
  CasX Variant
QEIKRINKIRRRLVKDSNTKKAGKTGPMKTLLVRVMTPDLRERLENLRKKPENIPQPISNTSQANLNKLLTDYTEMKKAILHVYWEEFQKDPVGLMSRVAQPASKKIDQNKLKPEMDEKGNLTTAGFACSQCGQPLFVYKLEQVSEKGKAYTNYFGRCNVAEHEKLILLAQLKPEKDSDEAVTYSLGKFGQRALDFYSIHVTKESTHPVKPLAQIAGNRYASGPVGKALSDACMGTIASFLSKYQDIIIEHQKVVKGNQKRLESLRELAGKENLEYPSVTLPPQPHTKEGVDAYNEVIARVRMWVNLNLWQKLKLSRDDAKPLLRLKGFPSFPLVERQANEVDWWDMVCNVKKLINEKKEDGKVFWQNLAGYKRQEALRPYLSSEEDRKKGKKFARYQLGDLLLHLEKKHGEDWGKVYDEAWERIDKKVEGLSKHIKLEEERRSEDAQSKAALTDWLRAKASFVIEGLKEADKDEFCRCELKLQKWYGDLRGKPFAIEAENSILDISGFSKQYNCAFIWQKDGVKKLNLYLIINYFKGGKLRFKKIKPEAFEANRFYTVINKKSGEIVPMEVNFNFDDPNLIILPLAFGKRQGREFIWNDLLSLETGSLKLANGRVIEKTLYNRRTRQDEPALFVALTFERREVLDSSNIKPMNLIGVDRGENIPAVIALTDPEGCPLSRFKDSLGNPTHILRIGESYKEKQRTIQAKKEVEQRRAGGYSRKYASKAKNLADDMVRNTARDLLYYAVTQDAMLIFENLSRGFGRQGKRTFMAERQYTRMEDWLTAKLAYEGLPSKTYLSKTLAQYTSKTCSNCGFTITSADYDRVLEKLKKTATGWMTTINGKELKVEGQITYYNRYKRQNVVKDLSVELDRLSEESVNNDISSWTKGRSGEALSLLKKRFSHRPVQEKFVCLNCGFETHADEQAALNIARSWLFLRSQEYKKYQTNKTTGNTDKRAFVETWQSFYRKKLKEVWKPAV

SEQ ID NO: 43707 - protein, 978 aa, Artificial Sequence
  CasX Variant
QEIKRINKIRRRLVKDSNTKKAGKTGPMKTLLVRVMTPDLRERLENLRKKPENIPQPISNTSRANLNKLLTDYTEMKKAITHVYWEEFQKDPVGLMSRVAQPASKKIDQNKLKPEMDEKGNLTTAGFACSQCGQPLFVYKLEQVSEKGKAYTNYFGRCNVAEHEKLILLAQLKPEKDSDEAVTYSLGKFGQRALDFYSIHVTKESTHPVKPLAQIAGNRYASGPVGKALSDACMGTIASFLSKYQDIIIEHQKVVKGNQKRLESLRELAGKENLEYPSVTLPPQPHTKEGVDAYNEVIARVRMWVNLNLWQKLKLSRDDAKPLLRLKGFPSFPLVERQANEVDWWDMVCNVKKLINEKKEDGKVFWQNLAGYKRQEALRPYLSSEEDRKKGKKFARYQLGDLLLHLEKKHGEDWGKVYDEAWERIDKKVEGLSKHIKLEEERRSEDAQSKAALTDWLRAKASFVIEGLKEADKDEFCRCELKLQKWYGDLRGKPFAIEAENSILDISGFSKQYNCAFIWQKDGVKKLNLYLIINYFKGGKLRFKKIKPEAFEANRFYTVINKKSGEIVPMEVNFNFDDPNLIILPLAFGKRQGREFIWNDLLSLETGSLKLANGRVIEKTLYNRRTRQDEPALFVALTFERREVLDSSNIKPMNLIGVDRGENIPAVIALTDPEGCPLSRFKDSLGNPTHILRIGESYKEKQRTIQAKKEVEQRRAGGYSRKYASKAKNLADDMVRNTARDLLYYAVTQDAMLIFENLSRGFGRQGKRTFMAERQYTRMEDWLTAKLAYEGLPSKTYLSKTLAQYTSKTCSNCGFTITSADYDRVLEKLKKTATGWMTTINGKELKVEGQITYYNRYKRQNVVKDLSVELDRLSEESVNNDISSWTKGRSGEALSLLKKRFSHRPVQEKFVCLNCGFETHADEQAALNIARSWLFLRSQEYKKYQTNKTTGNTDKRAFVETWQSFYRKKLKEVWKPAV

SEQ ID NO: 43708 - protein, 978 aa, Artificial Sequence
  CasX Variant
QEIKRINKIRRRLVKDSNTKKAGKTGPMKTLLVRVMTPDLRERLENLRKKPENIPQPISNTSRANLNKLLTDYTEMKKAILHVYGEEFQKDPVGLMSRVAQPASKKIDQNKLKPEMDEKGNLTTAGFACSQCGQPLFVYKLEQVSEKGKAYTNYFGRCNVAEHEKLILLAQLKPEKDSDEAVTYSLGKFGQRALDFYSIHVTKESTHPVKPLAQIAGNRYASGPVGKALSDACMGTIASFLSKYQDIIIEHQKVVKGNQKRLESLRELAGKENLEYPSVTLPPQPHTKEGVDAYNEVIARVRMWVNLNLWQKLKLSRDDAKPLLRLKGFPSFPLVERQANEVDWWDMVCNVKKLINEKKEDGKVFWQNLAGYKRQEALRPYLSSEEDRKKGKKFARYQLGDLLLHLEKKHGEDWGKVYDEAWERIDKKVEGLSKHIKLEEERRSEDAQSKAALTDWLRAKASFVIEGLKEADKDEFCRCELKLQKWYGDLRGKPFAIEAENSILDISGFSKQYNCAFIWQKDGVKKLNLYLIINYFKGGKLRFKKIKPEAFEANRFYTVINKKSGEIVPMEVNFNFDDPNLIILPLAFGKRQGREFIWNDLLSLETGSLKLANGRVIEKTLYNRRTRQDEPALFVALTFERREVLDSSNIKPMNLIGVDRGENIPAVIALTDPEGCPLSRFKDSLGNPTHILRIGESYKEKQRTIQAKKEVEQRRAGGYSRKYASKAKNLADDMVRNTARDLLYYAVTQDAMLIFENLSRGFGRQGKRTFMAERQYTRMEDWLTAKLAYEGLPSKTYLSKTLAQYTSKTCSNCGFTITSADYDRVLEKLKKTATGWMTTINGKELKVEGQITYYNRYKRQNVVKDLSVELDRLSEESVNNDISSWTKGRSGEALSLLKKRFSHRPVQEKFVCLNCGFETHADEQAALNIARSWLFLRSQEYKKYQTNKTTGNTDKRAFVETWQSFYRKKLKEVWKPAV

SEQ ID NO: 43709 - protein, 978 aa, Artificial Sequence
  CasX Variant
QEIKRINKIRRRLVKDSNTKKAGKTGPMKTLLVRVMTPDLRERLENLRKKPENIPQPISNTSRANLNKLLTDYTEMKKAILHVYDEEFQKDPVGLMSRVAQPASKKIDQNKLKPEMDEKGNLTTAGFACSQCGQPLFVYKLEQVSEKGKAYTNYFGRCNVAEHEKLILLAQLKPEKDSDEAVTYSLGKFGQRALDFYSIHVTKESTHPVKPLAQIAGNRYASGPVGKALSDACMGTIASFLSKYQDIIIEHQKVVKGNQKRLESLRELAGKENLEYPSVTLPPQPHTKEGVDAYNEVIARVRMWVNLNLWQKLKLSRDDAKPLLRLKGFPSFPLVERQANEVDWWDMVCNVKKLINEKKEDGKVFWQNLAGYKRQEALRPYLSSEEDRKKGKKFARYQLGDLLLHLEKKHGEDWGKVYDEAWERIDKKVEGLSKHIKLEEERRSEDAQSKAALTDWLRAKASFVIEGLKEADKDEFCRCELKLQKWYGDLRGKPFAIEAENSILDISGFSKQYNCAFIWQKDGVKKLNLYLIINYFKGGKLRFKKIKPEAFEANRFYTVINKKSGEIVPMEVNFNFDDPNLIILPLAFGKRQGREFIWNDLLSLETGSLKLANGRVIEKTLYNRRTRQDEPALFVALTFERREVLDSSNIKPMNLIGVDRGENIPAVIALTDPEGCPLSRFKDSLGNPTHILRIGESYKEKQRTIQAKKEVEQRRAGGYSRKYASKAKNLADDMVRNTARDLLYYAVTQDAMLIFENLSRGFGRQGKRTFMAERQYTRMEDWLTAKLAYEGLPSKTYLSKTLAQYTSKTCSNCGFTITSADYDRVLEKLKKTATGWMTTINGKELKVEGQITYYNRYKRQNVVKDLSVELDRLSEESVNNDISSWTKGRSGEALSLLKKRFSHRPVQEKFVCLNCGFETHADEQAALNIARSWLFLRSQEYKKYQTNKTTGNTDKRAFVETWQSFYRKKLKEVWKPAV

SEQ ID NO: 43710 - protein, 978 aa, Artificial Sequence
  CasX Variant
QEIKRINKIRRRLVKDSNTKKAGKTGPMKTLLVRVMTPDLRERLENLRKKPENIPQPISNTSRANLNKLLTDYTEMKKAILHVYAEEFQKDPVGLMSRVAQPASKKIDQNKLKPEMDEKGNLTTAGFACSQCGQPLFVYKLEQVSEKGKAYTNYFGRCNVAEHEKLILLAQLKPEKDSDEAVTYSLGKFGQRALDFYSIHVTKESTHPVKPLAQIAGNRYASGPVGKALSDACMGTIASFLSKYQDIIIEHQKVVKGNQKRLESLRELAGKENLEYPSVTLPPQPHTKEGVDAYNEVIARVRMWVNLNLWQKLKLSRDDAKPLLRLKGFPSFPLVERQANEVDWWDMVCNVKKLINEKKEDGKVFWQNLAGYKRQEALRPYLSSEEDRKKGKKFARYQLGDLLLHLEKKHGEDWGKVYDEAWERIDKKVEGLSKHIKLEEERRSEDAQSKAALTDWLRAKASFVIEGLKEADKDEFCRCELKLQKWYGDLRGKPFAIEAENSILDISGFSKQYNCAFIWQKDGVKKLNLYLIINYFKGGKLRFKKIKPEAFEANRFYTVINKKSGEIVPMEVNFNFDDPNLIILPLAFGKRQGREFIWNDLLSLETGSLKLANGRVIEKTLYNRRTRQDEPALFVALTFERREVLDSSNIKPMNLIGVDRGENIPAVIALTDPEGCPLSRFKDSLGNPTHILRIGESYKEKQRTIQAKKEVEQRRAGGYSRKYASKAKNLADDMVRNTARDLLYYAVTQDAMLIFENLSRGFGRQGKRTFMAERQYTRMEDWLTAKLAYEGLPSKTYLSKTLAQYTSKTCSNCGFTITSADYDRVLEKLKKTATGWMTTINGKELKVEGQITYYNRYKRQNVVKDLSVELDRLSEESVNNDISSWTKGRSGEALSLLKKRFSHRPVQEKFVCLNCGFETHADEQAALNIARSWLFLRSQEYKKYQTNKTTGNTDKRAFVETWQSFYRKKLKEVWKPAV

SEQ ID NO: 43711 - protein, 978 aa, Artificial Sequence
  CasX Variant
QEIKRINKIRRRLVKDSNTKKAGKTGPMKTLLVRVMTPDLRERLENLRKKPENIPQPISNTSRANLNKLLTDYTEMKKAILHVYREEFQKDPVGLMSRVAQPASKKIDQNKLKPEMDEKGNLTTAGFACSQCGQPLFVYKLEQVSEKGKAYTNYFGRCNVAEHEKLILLAQLKPEKDSDEAVTYSLGKFGQRALDFYSIHVTKESTHPVKPLAQIAGNRYASGPVGKALSDACMGTIASFLSKYQDIIIEHQKVVKGNQKRLESLRELAGKENLEYPSVTLPPQPHTKEGVDAYNEVIARVRMWVNLNLWQKLKLSRDDAKPLLRLKGFPSFPLVERQANEVDWWDMVCNVKKLINEKKEDGKVFWQNLAGYKRQEALRPYLSSEEDRKKGKKFARYQLGDLLLHLEKKHGEDWGKVYDEAWERIDKKVEGLSKHIKLEEERRSEDAQSKAALTDWLRAKASFVIEGLKEADKDEFCRCELKLQKWYGDLRGKPFAIEAENSILDISGFSKQYNCAFIWQKDGVKKLNLYLIINYFKGGKLRFKKIKPEAFEANRFYTVINKKSGEIVPMEVNFNFDDPNLIILPLAFGKRQGREFIWNDLLSLETGSLKLANGRVIEKTLYNRRTRQDEPALFVALTFERREVLDSSNIKPMNLIGVDRGENIPAVIALTDPEGCPLSRFKDSLGNPTHILRIGESYKEKQRTIQAKKEVEQRRAGGYSRKYASKAKNLADDMVRNTARDLLYYAVTQDAMLIFENLSRGFGRQGKRTFMAERQYTRMEDWLTAKLAYEGLPSKTYLSKTLAQYTSKTCSNCGFTITSADYDRVLEKLKKTATGWMTTINGKELKVEGQITYYNRYKRQNVVKDLSVELDRLSEESVNNDISSWTKGRSGEALSLLKKRFSHRPVQEKFVCLNCGFETHADEQAALNIARSWLFLRSQEYKKYQTNKTTGNTDKRAFVETWQSFYRKKLKEVWKPAV

SEQ ID NO: 43712 - protein, 978 aa, Artificial Sequence
  CasX Variant
QEIKRINKIRRRLVKDSNTKKAGKTGPMKTLLVRVMTPDLRERLENLRKKPENIPQPISNTSRANLNKLLTDYTEMKKAILHVYWEEFQKDPVGLMSRVAQPASKKIDQNKLKPEMDEKGNLTTAGFACSQCGQPLFVYKLEQVSEKGKAYTNYFGRCNVAEHEKLIKLAQLKPEKDSDEAVTYSLGKFGQRALDFYSIHVTKESTHPVKPLAQIAGNRYASGPVGKALSDACMGTIASFLSKYQDIIIEHQKVVKGNQKRLESLRELAGKENLEYPSVTLPPQPHTKEGVDAYNEVIARVRMWVNLNLWQKLKLSRDDAKPLLRLKGFPSFPLVERQANEVDWWDMVCNVKKLINEKKEDGKVFWQNLAGYKRQEALRPYLSSEEDRKKGKKFARYQLGDLLLHLEKKHGEDWGKVYDEAWERIDKKVEGLSKHIKLEEERRSEDAQSKAALTDWLRAKASFVIEGLKEADKDEFCRCELKLQKWYGDLRGKPFAIEAENSILDISGFSKQYNCAFIWQKDGVKKLNLYLIINYFKGGKLRFKKIKPEAFEANRFYTVINKKSGEIVPMEVNFNFDDPNLIILPLAFGKRQGREFIWNDLLSLETGSLKLANGRVIEKTLYNRRTRQDEPALFVALTFERREVLDSSNIKPMNLIGVDRGENIPAVIALTDPEGCPLSRFKDSLGNPTHILRIGESYKEKQRTIQAKKEVEQRRAGGYSRKYASKAKNLADDMVRNTARDLLYYAVTQDAMLIFENLSRGFGRQGKRTFMAERQYTRMEDWLTAKLAYEGLPSKTYLSKTLAQYTSKTCSNCGFTITSADYDRVLEKLKKTATGWMTTINGKELKVEGQITYYNRYKRQNVVKDLSVELDRLSEESVNNDISSWTKGRSGEALSLLKKRFSHRPVQEKFVCLNCGFETHADEQAALNIARSWLFLRSQEYKKYQTNKTTGNTDKRAFVETWQSFYRKKLKEVWKPAV

SEQ ID NO: 43713 - protein, 978 aa, Artificial Sequence
  CasX Variant
QEIKRINKIRRRLVKDSNTKKAGKTGPMKTLLVRVMTPDLRERLENLRKKPENIPQPISNTSRANLNKLLTDYTEMKKAILHVYWEEFQKDPVGLMSRVAQPASKKIDQNKLKPEMDEKGNLTTAGFACSQCGQPLFVYKLEQVSEKGKAYTNYFGRCNVAEHEKLILLYQLKPEKDSDEAVTYSLGKFGQRALDFYSIHVTKESTHPVKPLAQIAGNRYASGPVGKALSDACMGTIASFLSKYQDIIIEHQKVVKGNQKRLESLRELAGKENLEYPSVTLPPQPHTKEGVDAYNEVIARVRMWVNLNLWQKLKLSRDDAKPLLRLKGFPSFPLVERQANEVDWWDMVCNVKKLINEKKEDGKVFWQNLAGYKRQEALRPYLSSEEDRKKGKKFARYQLGDLLLHLEKKHGEDWGKVYDEAWERIDKKVEGLSKHIKLEEERRSEDAQSKAALTDWLRAKASFVIEGLKEADKDEFCRCELKLQKWYGDLRGKPFAIEAENSILDISGFSKQYNCAFIWQKDGVKKLNLYLIINYFKGGKLRFKKIKPEAFEANRFYTVINKKSGEIVPMEVNFNFDDPNLIILPLAFGKRQGREFIWNDLLSLETGSLKLANGRVIEKTLYNRRTRQDEPALFVALTFERREVLDSSNIKPMNLIGVDRGENIPAVIALTDPEGCPLSRFKDSLGNPTHILRIGESYKEKQRTIQAKKEVEQRRAGGYSRKYASKAKNLADDMVRNTARDLLYYAVTQDAMLIFENLSRGFGRQGKRTFMAERQYTRMEDWLTAKLAYEGLPSKTYLSKTLAQYTSKTCSNCGFTITSADYDRVLEKLKKTATGWMTTINGKELKVEGQITYYNRYKRQNVVKDLSVELDRLSEESVNNDISSWTKGRSGEALSLLKKRFSHRPVQEKFVCLNCGFETHADEQAALNIARSWLFLRSQEYKKYQTNKTTGNTDKRAFVETWQSFYRKKLKEVWKPAV

SEQ ID NO: 43714 - protein, 978 aa, Artificial Sequence
  CasX Variant
QEIKRINKIRRRLVKDSNTKKAGKTGPMKTLLVRVMTPDLRERLENLRKKPENIPQPISNTSRANLNKLLTDYTEMKKAILHVYWEEFQKDPVGLMSRVAQPASKKIDQNKLKPEMDEKGNLTTAGFACSQCGQPLFVYKLEQVSEKGKAYTNYFGRCNVAEHEKLILLSQLKPEKDSDEAVTYSLGKFGQRALDFYSIHVTKESTHPVKPLAQIAGNRYASGPVGKALSDACMGTIASFLSKYQDIIIEHQKVVKGNQKRLESLRELAGKENLEYPSVTLPPQPHTKEGVDAYNEVIARVRMWVNLNLWQKLKLSRDDAKPLLRLKGFPSFPLVERQANEVDWWDMVCNVKKLINEKKEDGKVFWQNLAGYKRQEALRPYLSSEEDRKKGKKFARYQLGDLLLHLEKKHGEDWGKVYDEAWERIDKKVEGLSKHIKLEEERRSEDAQSKAALTDWLRAKASFVIEGLKEADKDEFCRCELKLQKWYGDLRGKPFAIEAENSILDISGFSKQYNCAFIWQKDGVKKLNLYLIINYFKGGKLRFKKIKPEAFEANRFYTVINKKSGEIVPMEVNFNFDDPNLIILPLAFGKRQGREFIWNDLLSLETGSLKLANGRVIEKTLYNRRTRQDEPALFVALTFERREVLDSSNIKPMNLIGVDRGENIPAVIALTDPEGCPLSRFKDSLGNPTHILRIGESYKEKQRTIQAKKEVEQRRAGGYSRKYASKAKNLADDMVRNTARDLLYYAVTQDAMLIFENLSRGFGRQGKRTFMAERQYTRMEDWLTAKLAYEGLPSKTYLSKTLAQYTSKTCSNCGFTITSADYDRVLEKLKKTATGWMTTINGKELKVEGQITYYNRYKRQNVVKDLSVELDRLSEESVNNDISSWTKGRSGEALSLLKKRFSHRPVQEKFVCLNCGFETHADEQAALNIARSWLFLRSQEYKKYQTNKTTGNTDKRAFVETWQSFYRKKLKEVWKPAV

SEQ ID NO: 43715 - protein, 978 aa, Artificial Sequence
  CasX Variant
QEIKRINKIRRRLVKDSNTKKAGKTGPMKTLLVRVMTPDLRERLENLRKKPENIPQPISNTSRANLNKLLTDYTEMKKAILHVYWEEFQKDPVGLMSRVAQPASKKIDQNKLKPEMDEKGNLTTAGFACSQCGQPLFVYKLEQVSEKGKAYTNYFGRCNVAEHEKLILLAQLKPPKDSDEAVTYSLGKFGQRALDFYSIHVTKESTHPVKPLAQIAGNRYASGPVGKALSDACMGTIASFLSKYQDIIIEHQKVVKGNQKRLESLRELAGKENLEYPSVTLPPQPHTKEGVDAYNEVIARVRMWVNLNLWQKLKLSRDDAKPLLRLKGFPSFPLVERQANEVDWWDMVCNVKKLINEKKEDGKVFWQNLAGYKRQEALRPYLSSEEDRKKGKKFARYQLGDLLLHLEKKHGEDWGKVYDEAWERIDKKVEGLSKHIKLEEERRSEDAQSKAALTDWLRAKASFVIEGLKEADKDEFCRCELKLQKWYGDLRGKPFAIEAENSILDISGFSKQYNCAFIWQKDGVKKLNLYLIINYFKGGKLRFKKIKPEAFEANRFYTVINKKSGEIVPMEVNFNFDDPNLIILPLAFGKRQGREFIWNDLLSLETGSLKLANGRVIEKTLYNRRTRQDEPALFVALTFERREVLDSSNIKPMNLIGVDRGENIPAVIALTDPEGCPLSRFKDSLGNPTHILRIGESYKEKQRTIQAKKEVEQRRAGGYSRKYASKAKNLADDMVRNTARDLLYYAVTQDAMLIFENLSRGFGRQGKRTFMAERQYTRMEDWLTAKLAYEGLPSKTYLSKTLAQYTSKTCSNCGFTITSADYDRVLEKLKKTATGWMTTINGKELKVEGQITYYNRYKRQNVVKDLSVELDRLSEESVNNDISSWTKGRSGEALSLLKKRFSHRPVQEKFVCLNCGFETHADEQAALNIARSWLFLRSQEYKKYQTNKTTGNTDKRAFVETWQSFYRKKLKEVWKPAV

SEQ ID NO: 43716 - protein, 977 aa, Artificial Sequence
  CasX Variant
QEIKRINKIRRRLVKDSNTKKAGKTGPMKTLLVRVMTPDLRERLENLRKKPENIPQPISNTSRANLNKLLTDYTEMKKAILHVYWEEFQKDPVGLMSRVAQPASKKIDQNKLKPEMDEKGNLTTAGFACSQCGQPLFVYKLEQVSEKGKAYTNYFGRCNVAEHEKLILLAQLKPEKDSDEAVTYSLGKFGQRALDFYSIHVTKESTHPVKPLAQIAGNRYASPVGKALSDACMGTIASFLSKYQDIIIEHQKVVKGNQKRLESLRELAGKENLEYPSVTLPPQPHTKEGVDAYNEVIARVRMWVNLNLWQKLKLSRDDAKPLLRLKGFPSFPLVERQANEVDWWDMVCNVKKLINEKKEDGKVFWQNLAGYKRQEALRPYLSSEEDRKKGKKFARYQLGDLLLHLEKKHGEDWGKVYDEAWERIDKKVEGLSKHIKLEEERRSEDAQSKAALTDWLRAKASFVIEGLKEADKDEFCRCELKLQKWYGDLRGKPFAIEAENSILDISGFSKQYNCAFIWQKDGVKKLNLYLIINYFKGGKLRFKKIKPEAFEANRFYTVINKKSGEIVPMEVNFNFDDPNLIILPLAFGKRQGREFIWNDLLSLETGSLKLANGRVIEKTLYNRRTRQDEPALFVALTFERREVLDSSNIKPMNLIGVDRGENIPAVIALTDPEGCPLSRFKDSLGNPTHILRIGESYKEKQRTIQAKKEVEQRRAGGYSRKYASKAKNLADDMVRNTARDLLYYAVTQDAMLIFENLSRGFGRQGKRTFMAERQYTRMEDWLTAKLAYEGLPSKTYLSKTLAQYTSKTCSNCGFTITSADYDRVLEKLKKTATGWMTTINGKELKVEGQITYYNRYKRQNVVKDLSVELDRLSEESVNNDISSWTKGRSGEALSLLKKRFSHRPVQEKFVCLNCGFETHADEQAALNIARSWLFLRSQEYKKYQTNKTTGNTDKRAFVETWQSFYRKKLKEVWKPAV

SEQ ID NO: 43717 - protein, 978 aa, Artificial Sequence; identical to SEQ ID NO: 43665
  CasX Variant

SEQ ID NO: 43718 - protein, 978 aa, Artificial Sequence
  CasX Variant
QEIKRINKIRRRLVKDSNTKKAGKTGPMKTLLVRVMTPDLRERLENLRKKPENIPQPISNTSRANLNKLLTDYTEMKKAILHVYWEEFQKDPVGLMSRVAQPASKKIDQNKLKPEMDEKGNLTTAGFACSQCGQPLFVYKLEQVSEKGKAYTNYFGRCNVAEHEKLILLAQLKPEKDSDEAVTYSLGKFGQRALDFYSIHVTKESTHPVKPLAQIAGNRYASGPVGKALSDACMGTIASFLSKYQDIIIEHQKVVKGNQKRLESLRELAGKENLEYPSVTLPPQPHTGEGVDAYNEVIARVRMWVNLNLWQKLKLSRDDAKPLLRLKGFPSFPLVERQANEVDWWDMVCNVKKLINEKKEDGKVFWQNLAGYKRQEALRPYLSSEEDRKKGKKFARYQLGDLLLHLEKKHGEDWGKVYDEAWERIDKKVEGLSKHIKLEEERRSEDAQSKAALTDWLRAKASFVIEGLKEADKDEFCRCELKLQKWYGDLRGKPFAIEAENSILDISGFSKQYNCAFIWQKDGVKKLNLYLIINYFKGGKLRFKKIKPEAFEANRFYTVINKKSGEIVPMEVNFNFDDPNLIILPLAFGKRQGREFIWNDLLSLETGSLKLANGRVIEKTLYNRRTRQDEPALFVALTFERREVLDSSNIKPMNLIGVDRGENIPAVIALTDPEGCPLSRFKDSLGNPTHILRIGESYKEKQRTIQAKKEVEQRRAGGYSRKYASKAKNLADDMVRNTARDLLYYAVTQDAMLIFENLSRGFGRQGKRTFMAERQYTRMEDWLTAKLAYEGLPSKTYLSKTLAQYTSKTCSNCGFTITSADYDRVLEKLKKTATGWMTTINGKELKVEGQITYYNRYKRQNVVKDLSVELDRLSEESVNNDISSWTKGRSGEALSLLKKRFSHRPVQEKFVCLNCGFETHADEQAALNIARSWLFLRSQEYKKYQTNKTTGNTDKRAFVETWQSFYRKKLKEVWKPAV

SEQ ID NO: 43719 - protein, 978 aa, Artificial Sequence
  CasX Variant
QEIKRINKIRRRLVKDSNTKKAGKTGPMKTLLVRVMTPDLRERLENLRKKPENIPQPISNTSRANLNKLLTDYTEMKKAILHVYWEEFQKDPVGLMSRVAQPASKKIDQNKLKPEMDEKGNLTTAGFACSQCGQPLFVYKLEQVSEKGKAYTNYFGRCNVAEHEKLILLAQLKPEKDSDEAVTYSLGKFGQRALDFYSIHVTKESTHPVKPLAQIAGNRYASGPVGKALSDACMGTIASFLSKYQDIIIEHQKVVKGNQKRLESLRELAGKENLEYPSVTLPPQPHTSEGVDAYNEVIARVRMWVNLNLWQKLKLSRDDAKPLLRLKGFPSFPLVERQANEVDWWDMVCNVKKLINEKKEDGKVFWQNLAGYKRQEALRPYLSSEEDRKKGKKFARYQLGDLLLHLEKKHGEDWGKVYDEAWERIDKKVEGLSKHIKLEEERRSEDAQSKAALTDWLRAKASFVIEGLKEADKDEFCRCELKLQKWYGDLRGKPFAIEAENSILDISGFSKQYNCAFIWQKDGVKKLNLYLIINYFKGGKLRFKKIKPEAFEANRFYTVINKKSGEIVPMEVNFNFDDPNLIILPLAFGKRQGREFIWNDLLSLETGSLKLANGRVIEKTLYNRRTRQDEPALFVALTFERREVLDSSNIKPMNLIGVDRGENIPAVIALTDPEGCPLSRFKDSLGNPTHILRIGESYKEKQRTIQAKKEVEQRRAGGYSRKYASKAKNLADDMVRNTARDLLYYAVTQDAMLIFENLSRGFGRQGKRTFMAERQYTRMEDWLTAKLAYEGLPSKTYLSKTLAQYTSKTCSNCGFTITSADYDRVLEKLKKTATGWMTTINGKELKVEGQITYYNRYKRQNVVKDLSVELDRLSEESVNNDISSWTKGRSGEALSLLKKRFSHRPVQEKFVCLNCGFETHADEQAALNIARSWLFLRSQEYKKYQTNKTTGNTDKRAFVETWQSFYRKKLKEVWKPAV

SEQ ID NO: 43720 - protein, 978 aa, Artificial Sequence
  CasX Variant
QEIKRINKIRRRLVKDSNTKKAGKTGPMKTLLVRVMTPDLRERLENLRKKPENIPQPISNTSRANLNKLLTDYTEMKKAILHVYWEEFQKDPVGLMSRVAQPASKKIDQNKLKPEMDEKGNLTTAGFACSQCGQPLFVYKLEQVSEKGKAYTNYFGRCNVAEHEKLILLAQLKPEKDSDEAVTYSLGKFGQRALDFYSIHVTKESTHPVKPLAQIAGNRYASGPVGKALSDACMGTIASFLSKYQDIIIEHQKVVKGNQKRLESLRELAGKENLEYPSVTLPPQPHTKEGLDAYNEVIARVRMWVNLNLWQKLKLSRDDAKPLLRLKGFPSFPLVERQANEVDWWDMVCNVKKLINEKKEDGKVFWQNLAGYKRQEALRPYLSSEEDRKKGKKFARYQLGDLLLHLEKKHGEDWGKVYDEAWERIDKKVEGLSKHIKLEEERRSEDAQSKAALTDWLRAKASFVIEGLKEADKDEFCRCELKLQKWYGDLRGKPFAIEAENSILDISGFSKQYNCAFIWQKDGVKKLNLYLIINYFKGGKLRFKKIKPEAFEANRFYTVINKKSGEIVPMEVNFNFDDPNLIILPLAFGKRQGREFIWNDLLSLETGSLKLANGRVIEKTLYNRRTRQDEPALFVALTFERREVLDSSNIKPMNLIGVDRGENIPAVIALTDPEGCPLSRFKDSLGNPTHILRIGESYKEKQRTIQAKKEVEQRRAGGYSRKYASKAKNLADDMVRNTARDLLYYAVTQDAMLIFENLSRGFGRQGKRTFMAERQYTRMEDWLTAKLAYEGLPSKTYLSKTLAQYTSKTCSNCGFTITSADYDRVLEKLKKTATGWMTTINGKELKVEGQITYYNRYKRQNVVKDLSVELDRLSEESVNNDISSWTKGRSGEALSLLKKRFSHRPVQEKFVCLNCGFETHADEQAALNIARSWLFLRSQEYKKYQTNKTTGNTDKRAFVETWQSFYRKKLKEVWKPAV

SEQ ID NO: 43721 - protein, 978 aa, Artificial Sequence
  CasX Variant
QEIKRINKIRRRLVKDSNTKKAGKTGPMKTLLVRVMTPDLRERLENLRKKPENIPQPISNTSRANLNKLLTDYTEMKKAILHVYWEEFQKDPVGLMSRVAQPASKKIDQNKLKPEMDEKGNLTTAGFACSQCGQPLFVYKLEQVSEKGKAYTNYFGRCNVAEHEKLILLAQLKPEKDSDEAVTYSLGKFGQRALDFYSIHVTKESTHPVKPLAQIAGNRYASGPVGKALSDACMGTIASFLSKYQDIIIEHQKVVKGNQKRLESLRELAGKENLEYPSVTLPPQPHTKEGVDAYNEVIARVRTWVNLNLWQKLKLSRDDAKPLLRLKGFPSFPLVERQANEVDWWDMVCNVKKLINEKKEDGKVFWQNLAGYKRQEALRPYLSSEEDRKKGKKFARYQLGDLLLHLEKKHGEDWGKVYDEAWERIDKKVEGLSKHIKLEEERRSEDAQSKAALTDWLRAKASFVIEGLKEADKDEFCRCELKLQKWYGDLRGKPFAIEAENSILDISGFSKQYNCAFIWQKDGVKKLNLYLIINYFKGGKLRFKKIKPEAFEANRFYTVINKKSGEIVPMEVNFNFDDPNLIILPLAFGKRQGREFIWNDLLSLETGSLKLANGRVIEKTLYNRRTRQDEPALFVALTFERREVLDSSNIKPMNLIGVDRGENIPAVIALTDPEGCPLSRFKDSLGNPTHILRIGESYKEKQRTIQAKKEVEQRRAGGYSRKYASKAKNLADDMVRNTARDLLYYAVTQDAMLIFENLSRGFGRQGKRTFMAERQYTRMEDWLTAKLAYEGLPSKTYLSKTLAQYTSKTCSNCGFTITSADYDRVLEKLKKTATGWMTTINGKELKVEGQITYYNRYKRQNVVKDLSVELDRLSEESVNNDISSWTKGRSGEALSLLKKRFSHRPVQEKFVCLNCGFETHADEQAALNIARSWLFLRSQEYKKYQTNKTTGNTDKRAFVETWQSFYRKKLKEVWKPAV

SEQ ID NO: 43722 - protein, 978 aa, Artificial Sequence
  CasX Variant
QEIKRINKIRRRLVKDSNTKKAGKTGPMKTLLVRVMTPDLRERLENLRKKPENIPQPISNTSRANLNKLLTDYTEMKKAILHVYWEEFQKDPVGLMSRVAQPASKKIDQNKLKPEMDEKGNLTTAGFACSQCGQPLFVYKLEQVSEKGKAYTNYFGRCNVAEHEKLILLAQLKPEKDSDEAVTYSLGKFGQRALDFYSIHVTKESTHPVKPLAQIAGNRYASGPVGKALSDACMGTIASFLSKYQDIIIEHQKVVKGNQKRLESLRELAGKENLEYPSVTLPPQPHTKEGVDAYNEVIARVRWWVNLNLWQKLKLSRDDAKPLLRLKGFPSFPLVERQANEVDWWDMVCNVKKLINEKKEDGKVFWQNLAGYKRQEALRPYLSSEEDRKKGKKFARYQLGDLLLHLEKKHGEDWGKVYDEAWERIDKKVEGLSKHIKLEEERRSEDAQSKAALTDWLRAKASFVIEGLKEADKDEFCRCELKLQKWYGDLRGKPFAIEAENSILDISGFSKQYNCAFIWQKDGVKKLNLYLIINYFKGGKLRFKKIKPEAFEANRFYTVINKKSGEIVPMEVNFNFDDPNLIILPLAFGKRQGREFIWNDLLSLETGSLKLANGRVIEKTLYNRRTRQDEPALFVALTFERREVLDSSNIKPMNLIGVDRGENIPAVIALTDPEGCPLSRFKDSLGNPTHILRIGESYKEKQRTIQAKKEVEQRRAGGYSRKYASKAKNLADDMVRNTARDLLYYAVTQDAMLIFENLSRGFGRQGKRTFMAERQYTRMEDWLTAKLAYEGLPSKTYLSKTLAQYTSKTCSNCGFTITSADYDRVLEKLKKTATGWMTTINGKELKVEGQITYYNRYKRQNVVKDLSVELDRLSEESVNNDISSWTKGRSGEALSLLKKRFSHRPVQEKFVCLNCGFETHADEQAALNIARSWLFLRSQEYKKYQTNKTTGNTDKRAFVETWQSFYRKKLKEVWKPAV

SEQ ID NO: 43723 - protein, 978 aa, Artificial Sequence
  CasX Variant
QEIKRINKIRRRLVKDSNTKKAGKTGPMKTLLVRVMTPDLRERLENLRKKPENIPQPISNTSRANLNKLLTDYTEMKKAILHVYWEEFQKDPVGLMSRVAQPASKKIDQNKLKPEMDEKGNLTTAGFACSQCGQPLFVYKLEQVSEKGKAYTNYFGRCNVAEHEKLILLAQLKPEKDSDEAVTYSLGKFGQRALDFYSIHVTKESTHPVKPLAQIAGNRYASGPVGKALSDACMGTIASFLSKYQDIIIEHQKVVKGNQKRLESLRELAGKENLEYPSVTLPPQPHTKEGVDAYNEVIARVRMWVNLNLWQKLKLSRDDAKPLLRLKNFPSFPLVERQANEVDWWDMVCNVKKLINEKKEDGKVFWQNLAGYKRQEALRPYLSSEEDRKKGKKFARYQLGDLLLHLEKKHGEDWGKVYDEAWERIDKKVEGLSKHIKLEEERRSEDAQSKAALTDWLRAKASFVIEGLKEADKDEFCRCELKLQKWYGDLRGKPFAIEAENSILDISGFSKQYNCAFIWQKDGVKKLNLYLIINYFKGGKLRFKKIKPEAFEANRFYTVINKKSGEIVPMEVNFNFDDPNLIILPLAFGKRQGREFIWNDLLSLETGSLKLANGRVIEKTLYNRRTRQDEPALFVALTFERREVLDSSNIKPMNLIGVDRGENIPAVIALTDPEGCPLSRFKDSLGNPTHILRIGESYKEKQRTIQAKKEVEQRRAGGYSRKYASKAKNLADDMVRNTARDLLYYAVTQDAMLIFENLSRGFGRQGKRTFMAERQYTRMEDWLTAKLAYEGLPSKTYLSKTLAQYTSKTCSNCGFTITSADYDRVLEKLKKTATGWMTTINGKELKVEGQITYYNRYKRQNVVKDLSVELDRLSEESVNNDISSWTKGRSGEALSLLKKRFSHRPVQEKFVCLNCGFETHADEQAALNIARSWLFLRSQEYKKYQTNKTTGNTDKRAFVETWQSFYRKKLKEVWKPAV

SEQ ID NO: 43724 - protein, 978 aa, Artificial Sequence
  CasX Variant
QEIKRINKIRRRLVKDSNTKKAGKTGPMKTLLVRVMTPDLRERLENLRKKPENIPQPISNTSRANLNKLLTDYTEMKKAILHVYWEEFQKDPVGLMSRVAQPASKKIDQNKLKPEMDEKGNLTTAGFACSQCGQPLFVYKLEQVSEKGKAYTNYFGRCNVAEHEKLILLAQLKPEKDSDEAVTYSLGKFGQRALDFYSIHVTKESTHPVKPLAQIAGNRYASGPVGKALSDACMGTIASFLSKYQDIIIEHQKVVKGNQKRLESLRELAGKENLEYPSVTLPPQPHTKEGVDAYNEVIARVRMWVNLNLWQKLKLSRDDAKPLLRLKGFPQFPLVERQANEVDWWDMVCNVKKLINEKKEDGKVFWQNLAGYKRQEALRPYLSSEEDRKKGKKFARYQLGDLLLHLEKKHGEDWGKVYDEAWERIDKKVEGLSKHIKLEEERRSEDAQSKAALTDWLRAKASFVIEGLKEADKDEFCRCELKLQKWYGDLRGKPFAIEAENSILDISGFSKQYNCAFIWQKDGVKKLNLYLIINYFKGGKLRFKKIKPEAFEANRFYTVINKKSGEIVPMEVNFNFDDPNLIILPLAFGKRQGREFIWNDLLSLETGSLKLANGRVIEKTLYNRRTRQDEPALFVALTFERREVLDSSNIKPMNLIGVDRGENIPAVIALTDPEGCPLSRFKDSLGNPTHILRIGESYKEKQRTIQAKKEVEQRRAGGYSRKYASKAKNLADDMVRNTARDLLYYAVTQDAMLIFENLSRGFGRQGKRTFMAERQYTRMEDWLTAKLAYEGLPSKTYLSKTLAQYTSKTCSNCGFTITSADYDRVLEKLKKTATGWMTTINGKELKVEGQITYYNRYKRQNVVKDLSVELDRLSEESVNNDISSWTKGRSGEALSLLKKRFSHRPVQEKFVCLNCGFETHADEQAALNIARSWLFLRSQEYKKYQTNKTTGNTDKRAFVETWQSFYRKKLKEVWKPAV

SEQ ID NO: 43725 - protein, 979 aa, Artificial Sequence
  CasX Variant
QEIKRINKIRRRLVKDSNTKKAGKTGPMKTLLVRVMTPDLRERLENLRKKPENIPQPISNTSRANLNKLLTDYTEMKKAILHVYWEEFQKDPVGLMSRVAQPASKKIDQNKLKPEMDEKGNLTTAGFACSQCGQPLFVYKLEQVSEKGKAYTNYFGRCNVAEHEKLILLAQLKPEKDSDEAVTYSLGKFGQRALDFYSIHVTKESTHPVKPLAQIAGNRYASGPVGKALSDACMGTIASFLSKYQDIIIEHQKVVKGNQKRLESLRELAGKENLEYPSVTLPPQPHTKEGVDAYNEVIARVRMWVNLNLWQKLKLSRDDAKPLLRLKGFPSFPALVERQANEVDWWDMVCNVKKLINEKKEDGKVFWQNLAGYKRQEALRPYLSSEEDRKKGKKFARYQLGDLLLHLEKKHGEDWGKVYDEAWERIDKKVEGLSKHIKLEEERRSEDAQSKAALTDWLRAKASFVIEGLKEADKDEFCRCELKLQKWYGDLRGKPFAIEAENSILDISGFSKQYNCAFIWQKDGVKKLNLYLIINYFKGGKLRFKKIKPEAFEANRFYTVINKKSGEIVPMEVNFNFDDPNLIILPLAFGKRQGREFIWNDLLSLETGSLKLANGRVIEKTLYNRRTRQDEPALFVALTFERREVLDSSNIKPMNLIGVDRGENIPAVIALTDPEGCPLSRFKDSLGNPTHILRIGESYKEKQRTIQAKKEVEQRRAGGYSRKYASKAKNLADDMVRNTARDLLYYAVTQDAMLIFENLSRGFGRQGKRTFMAERQYTRMEDWLTAKLAYEGLPSKTYLSKTLAQYTSKTCSNCGFTITSADYDRVLEKLKKTATGWMTTINGKELKVEGQITYYNRYKRQNVVKDLSVELDRLSEESVNNDISSWTKGRSGEALSLLKKRFSHRPVQEKFVCLNCGFETHADEQAALNIARSWLFLRSQEYKKYQTNKTTGNTDKRAFVETWQSFYRKKLKEVWKPAV

SEQ ID NO: 43726 - protein, 977 aa, Artificial Sequence
  CasX Variant
QEIKRINKIRRRLVKDSNTKKAGKTGPMKTLLVRVMTPDLRERLENLRKKPENIPQPISNTSRANLNKLLTDYTEMKKAILHVYWEEFQKDPVGLMSRVAQPASKKIDQNKLKPEMDEKGNLTTAGFACSQCGQPLFVYKLEQVSEKGKAYTNYFGRCNVAEHEKLILLAQLKPEKDSDEAVTYSLGKFGQRALDFYSIHVTKESTHPVKPLAQIAGNRYASGPVGKALSDACMGTIASFLSKYQDIIIEHQKVVKGNQKRLESLRELAGKENLEYPSVTLPPQPHTKEGVDAYNEVIARVRMWVNLNLWQKLKLSRDDAKPLLRLKGFPSFPLERQANEVDWWDMVCNVKKLINEKKEDGKVFWQNLAGYKRQEALRPYLSSEEDRKKGKKFARYQLGDLLLHLEKKHGEDWGKVYDEAWERIDKKVEGLSKHIKLEEERRSEDAQSKAALTDWLRAKASFVIEGLKEADKDEFCRCELKLQKWYGDLRGKPFAIEAENSILDISGFSKQYNCAFIWQKDGVKKLNLYLIINYFKGGKLRFKKIKPEAFEANRFYTVINKKSGEIVPMEVNFNFDDPNLIILPLAFGKRQGREFIWNDLLSLETGSLKLANGRVIEKTLYNRRTRQDEPALFVALTFERREVLDSSNIKPMNLIGVDRGENIPAVIALTDPEGCPLSRFKDSLGNPTHILRIGESYKEKQRTIQAKKEVEQRRAGGYSRKYASKAKNLADDMVRNTARDLLYYAVTQDAMLIFENLSRGFGRQGKRTFMAERQYTRMEDWLTAKLAYEGLPSKTYLSKTLAQYTSKTCSNCGFTITSADYDRVLEKLKKTATGWMTTINGKELKVEGQITYYNRYKRQNVVKDLSVELDRLSEESVNNDISSWTKGRSGEALSLLKKRFSHRPVQEKFVCLNCGFETHADEQAALNIARSWLFLRSQEYKKYQTNKTTGNTDKRAFVETWQSFYRKKLKEVWKPAV

SEQ ID NO: 43727 - protein, 978 aa, Artificial Sequence
  CasX Variant
QEIKRINKIRRRLVKDSNTKKAGKTGPMKTLLVRVMTPDLRERLENLRKKPENIPQPISNTSRANLNKLLTDYTEMKKAILHVYWEEFQKDPVGLMSRVAQPASKKIDQNKLKPEMDEKGNLTTAGFACSQCGQPLFVYKLEQVSEKGKAYTNYFGRCNVAEHEKLILLAQLKPEKDSDEAVTYSLGKFGQRALDFYSIHVTKESTHPVKPLAQIAGNRYASGPVGKALSDACMGTIASFLSKYQDIIIEHQKVVKGNQKRLESLRELAGKENLEYPSVTLPPQPHTKEGVDAYNEVIARVRMWVNLNLWQKLKLSRDDAKPLLRLKGFPSFPLVPRQANEVDWWDMVCNVKKLINEKKEDGKVFWQNLAGYKRQEALRPYLSSEEDRKKGKKFARYQLGDLLLHLEKKHGEDWGKVYDEAWERIDKKVEGLSKHIKLEEERRSEDAQSKAALTDWLRAKASFVIEGLKEADKDEFCRCELKLQKWYGDLRGKPFAIEAENSILDISGFSKQYNCAFIWQKDGVKKLNLYLIINYFKGGKLRFKKIKPEAFEANRFYTVINKKSGEIVPMEVNFNFDDPNLIILPLAFGKRQGREFIWNDLLSLETGSLKLANGRVIEKTLYNRRTRQDEPALFVALTFERREVLDSSNIKPMNLIGVDRGENIPAVIALTDPEGCPLSRFKDSLGNPTHILRIGESYKEKQRTIQAKKEVEQRRAGGYSRKYASKAKNLADDMVRNTARDLLYYAVTQDAMLIFENLSRGFGRQGKRTFMAERQYTRMEDWLTAKLAYEGLPSKTYLSKTLAQYTSKTCSNCGFTITSADYDRVLEKLKKTATGWMTTINGKELKVEGQITYYNRYKRQNVVKDLSVELDRLSEESVNNDISSWTKGRSGEALSLLKKRFSHRPVQEKFVCLNCGFETHADEQAALNIARSWLFLRSQEYKKYQTNKTTGNTDKRAFVETWQSFYRKKLKEVWKPAV

SEQ ID NO: 43728 - protein, 977 aa, Artificial Sequence
  CasX Variant
QEIKRINKIRRRLVKDSNTKKAGKTGPMKTLLVRVMTPDLRERLENLRKKPENIPQPISNTSRANLNKLLTDYTEMKKAILHVYWEEFQKDPVGLMSRVAQPASKKIDQNKLKPEMDEKGNLTTAGFACSQCGQPLFVYKLEQVSEKGKAYTNYFGRCNVAEHEKLILLAQLKPEKDSDEAVTYSLGKFGQRALDFYSIHVTKESTHPVKPLAQIAGNRYASGPVGKALSDACMGTIASFLSKYQDIIIEHQKVVKGNQKRLESLRELAGKENLEYPSVTLPPQPHTKEGVDAYNEVIARVRMWVNLNLWQKLKLSRDDAKPLLRLKGFPSFPLVRQANEVDWWDMVCNVKKLINEKKEDGKVFWQNLAGYKRQEALRPYLSSEEDRKKGKKFARYQLGDLLLHLEKKHGEDWGKVYDEAWERIDKKVEGLSKHIKLEEERRSEDAQSKAALTDWLRAKASFVIEGLKEADKDEFCRCELKLQKWYGDLRGKPFAIEAENSILDISGFSKQYNCAFIWQKDGVKKLNLYLIINYFKGGKLRFKKIKPEAFEANRFYTVINKKSGEIVPMEVNFNFDDPNLIILPLAFGKRQGREFIWNDLLSLETGSLKLANGRVIEKTLYNRRTRQDEPALFVALTFERREVLDSSNIKPMNLIGVDRGENIPAVIALTDPEGCPLSRFKDSLGNPTHILRIGESYKEKQRTIQAKKEVEQRRAGGYSRKYASKAKNLADDMVRNTARDLLYYAVTQDAMLIFENLSRGFGRQGKRTFMAERQYTRMEDWLTAKLAYEGLPSKTYLSKTLAQYTSKTCSNCGFTITSADYDRVLEKLKKTATGWMTTINGKELKVEGQITYYNRYKRQNVVKDLSVELDRLSEESVNNDISSWTKGRSGEALSLLKKRFSHRPVQEKFVCLNCGFETHADEQAALNIARSWLFLRSQEYKKYQTNKTTGNTDKRAFVETWQSFYRKKLKEVWKPAV

SEQ ID NO: 43729 - protein, 978 aa, Artificial Sequence
  CasX Variant
QEIKRINKIRRRLVKDSNTKKAGKTGPMKTLLVRVMTPDLRERLENLRKKPENIPQPISNTSRANLNKLLTDYTEMKKAILHVYWEEFQKDPVGLMSRVAQPASKKIDQNKLKPEMDEKGNLTTAGFACSQCGQPLFVYKLEQVSEKGKAYTNYFGRCNVAEHEKLILLAQLKPEKDSDEAVTYSLGKFGQRALDFYSIHVTKESTHPVKPLAQIAGNRYASGPVGKALSDACMGTIASFLSKYQDIIIEHQKVVKGNQKRLESLRELAGKENLEYPSVTLPPQPHTKEGVDAYNEVIARVRMWVNLNLWQKLKLSRDDAKPLLRLKGFPSFPLVLRQANEVDWWDMVCNVKKLINEKKEDGKVFWQNLAGYKRQEALRPYLSSEEDRKKGKKFARYQLGDLLLHLEKKHGEDWGKVYDEAWERIDKKVEGLSKHIKLEEERRSEDAQSKAALTDWLRAKASFVIEGLKEADKDEFCRCELKLQKWYGDLRGKPFAIEAENSILDISGFSKQYNCAFIWQKDGVKKLNLYLIINYFKGGKLRFKKIKPEAFEANRFYTVINKKSGEIVPMEVNFNFDDPNLIILPLAFGKRQGREFIWNDLLSLETGSLKLANGRVIEKTLYNRRTRQDEPALFVALTFERREVLDSSNIKPMNLIGVDRGENIPAVIALTDPEGCPLSRFKDSLGNPTHILRIGESYKEKQRTIQAKKEVEQRRAGGYSRKYASKAKNLADDMVRNTARDLLYYAVTQDAMLIFENLSRGFGRQGKRTFMAERQYTRMEDWLTAKLAYEGLPSKTYLSKTLAQYTSKTCSNCGFTITSADYDRVLEKLKKTATGWMTTINGKELKVEGQITYYNRYKRQNVVKDLSVELDRLSEESVNNDISSWTKGRSGEALSLLKKRFSHRPVQEKFVCLNCGFETHADEQAALNIARSWLFLRSQEYKKYQTNKTTGNTDKRAFVETWQSFYRKKLKEVWKPAV

SEQ ID NO: 43730 - protein, 978 aa, Artificial Sequence
  CasX Variant
QEIKRINKIRRRLVKDSNTKKAGKTGPMKTLLVRVMTPDLRERLENLRKKPENIPQPISNTSRANLNKLLTDYTEMKKAILHVYWEEFQKDPVGLMSRVAQPASKKIDQNKLKPEMDEKGNLTTAGFACSQCGQPLFVYKLEQVSEKGKAYTNYFGRCNVAEHEKLILLAQLKPEKDSDEAVTYSLGKFGQRALDFYSIHVTKESTHPVKPLAQIAGNRYASGPVGKALSDACMGTIASFLSKYQDIIIEHQKVVKGNQKRLESLRELAGKENLEYPSVTLPPQPHTKEGVDAYNEVIARVRMWVNLNLWQKLKLSRDDAKPLLRLKGFPSFPLVRRQANEVDWWDMVCNVKKLINEKKEDGKVFWQNLAGYKRQEALRPYLSSEEDRKKGKKFARYQLGDLLLHLEKKHGEDWGKVYDEAWERIDKKVEGLSKHIKLEEERRSEDAQSKAALTDWLRAKASFVIEGLKEADKDEFCRCELKLQKWYGDLRGKPFAIEAENSILDISGFSKQYNCAFIWQKDGVKKLNLYLIINYFKGGKLRFKKIKPEAFEANRFYTVINKKSGEIVPMEVNFNFDDPNLIILPLAFGKRQGREFIWNDLLSLETGSLKLANGRVIEKTLYNRRTRQDEPALFVALTFERREVLDSSNIKPMNLIGVDRGENIPAVIALTDPEGCPLSRFKDSLGNPTHILRIGESYKEKQRTIQAKKEVEQRRAGGYSRKYASKAKNLADDMVRNTARDLLYYAVTQDAMLIFENLSRGFGRQGKRTFMAERQYTRMEDWLTAKLAYEGLPSKTYLSKTLAQYTSKTCSNCGFTITSADYDRVLEKLKKTATGWMTTINGKELKVEGQITYYNRYKRQNVVKDLSVELDRLSEESVNNDISSWTKGRSGEALSLLKKRFSHRPVQEKFVCLNCGFETHADEQAALNIARSWLFLRSQEYKKYQTNKTTGNTDKRAFVETWQSFYRKKLKEVWKPAV

SEQ ID NO: 43731 - protein, 979 aa, Artificial Sequence
  CasX Variant
QEIKRINKIRRRLVKDSNTKKAGKTGPMKTLLVRVMTPDLRERLENLRKKPENIPQPISNTSRANLNKLLTDYTEMKKAILHVYWEEFQKDPVGLMSRVAQPASKKIDQNKLKPEMDEKGNLTTAGFACSQCGQPLFVYKLEQVSEKGKAYTNYFGRCNVAEHEKLILLAQLKPEKDSDEAVTYSLGKFGQRALDFYSIHVTKESTHPVKPLAQIAGNRYASGPVGKALSDACMGTIASFLSKYQDIIIEHQKVVKGNQKRLESLRELAGKENLEYPSVTLPPQPHTKEGVDAYNEVIARVRMWVNLNLWQKLKLSRDDAKPLLRLKGFPSFPLVERQQANEVDWWDMVCNVKKLINEKKEDGKVFWQNLAGYKRQEALRPYLSSEEDRKKGKKFARYQLGDLLLHLEKKHGEDWGKVYDEAWERIDKKVEGLSKHIKLEEERRSEDAQSKAALTDWLRAKASFVIEGLKEADKDEFCRCELKLQKWYGDLRGKPFAIEAENSILDISGFSKQYNCAFIWQKDGVKKLNLYLIINYFKGGKLRFKKIKPEAFEANRFYTVINKKSGEIVPMEVNFNFDDPNLIILPLAFGKRQGREFIWNDLLSLETGSLKLANGRVIEKTLYNRRTRQDEPALFVALTFERREVLDSSNIKPMNLIGVDRGENIPAVIALTDPEGCPLSRFKDSLGNPTHILRIGESYKEKQRTIQAKKEVEQRRAGGYSRKYASKAKNLADDMVRNTARDLLYYAVTQDAMLIFENLSRGFGRQGKRTFMAERQYTRMEDWLTAKLAYEGLPSKTYLSKTLAQYTSKTCSNCGFTITSADYDRVLEKLKKTATGWMTTINGKELKVEGQITYYNRYKRQNVVKDLSVELDRLSEESVNNDISSWTKGRSGEALSLLKKRFSHRPVQEKFVCLNCGFETHADEQAALNIARSWLFLRSQEYKKYQTNKTTGNTDKRAFVETWQSFYRKKLKEVWKPAV

SEQ ID NO: 43732 - protein, 979 aa, Artificial Sequence
  CasX Variant
QEIKRINKIRRRLVKDSNTKKAGKTGPMKTLLVRVMTPDLRERLENLRKKPENIPQPISNTSRANLNKLLTDYTEMKKAILHVYWEEFQKDPVGLMSRVAQPASKKIDQNKLKPEMDEKGNLTTAGFACSQCGQPLFVYKLEQVSEKGKAYTNYFGRCNVAEHEKLILLAQLKPEKDSDEAVTYSLGKFGQRALDFYSIHVTKESTHPVKPLAQIAGNRYASGPVGKALSDACMGTIASFLSKYQDIIIEHQKVVKGNQKRLESLRELAGKENLEYPSVTLPPQPHTKEGVDAYNEVIARVRMWVNLNLWQKLKLSRDDAKPLLRLKGFPSFPLVERQANHEVDWWDMVCNVKKLINEKKEDGKVFWQNLAGYKRQEALRPYLSSEEDRKKGKKFARYQLGDLLLHLEKKHGEDWGKVYDEAWERIDKKVEGLSKHIKLEEERRSEDAQSKAALTDWLRAKASFVIEGLKEADKDEFCRCELKLQKWYGDLRGKPFAIEAENSILDISGFSKQYNCAFIWQKDGVKKLNLYLIINYFKGGKLRFKKIKPEAFEANRFYTVINKKSGEIVPMEVNFNFDDPNLIILPLAFGKRQGREFIWNDLLSLETGSLKLANGRVIEKTLYNRRTRQDEPALFVALTFERREVLDSSNIKPMNLIGVDRGENIPAVIALTDPEGCPLSRFKDSLGNPTHILRIGESYKEKQRTIQAKKEVEQRRAGGYSRKYASKAKNLADDMVRNTARDLLYYAVTQDAMLIFENLSRGFGRQGKRTFMAERQYTRMEDWLTAKLAYEGLPSKTYLSKTLAQYTSKTCSNCGFTITSADYDRVLEKLKKTATGWMTTINGKELKVEGQITYYNRYKRQNVVKDLSVELDRLSEESVNNDISSWTKGRSGEALSLLKKRFSHRPVQEKFVCLNCGFETHADEQAALNIARSWLFLRSQEYKKYQTNKTTGNTDKRAFVETWQSFYRKKLKEVWKPAV

SEQ ID NO: 43733 - protein, 979 aa, Artificial Sequence
  CasX Variant
QEIKRINKIRRRLVKDSNTKKAGKTGPMKTLLVRVMTPDLRERLENLRKKPENIPQPISNTSRANLNKLLTDYTEMKKAILHVYWEEFQKDPVGLMSRVAQPASKKIDQNKLKPEMDEKGNLTTAGFACSQCGQPLFVYKLEQVSEKGKAYTNYFGRCNVAEHEKLILLAQLKPEKDSDEAVTYSLGKFGQRALDFYSIHVTKESTHPVKPLAQIAGNRYASGPVGKALSDACMGTIASFLSKYQDIIIEHQKVVKGNQKRLESLRELAGKENLEYPSVTLPPQPHTKEGVDAYNEVIARVRMWVNLNLWQKLKLSRDDAKPLLRLKGFPSFPLVERQANAEVDWWDMVCNVKKLINEKKEDGKVFWQNLAGYKRQEALRPYLSSEEDRKKGKKFARYQLGDLLLHLEKKHGEDWGKVYDEAWERIDKKVEGLSKHIKLEEERRSEDAQSKAALTDWLRAKASFVIEGLKEADKDEFCRCELKLQKWYGDLRGKPFAIEAENSILDISGFSKQYNCAFIWQKDGVKKLNLYLIINYFKGGKLRFKKIKPEAFEANRFYTVINKKSGEIVPMEVNFNFDDPNLIILPLAFGKRQGREFIWNDLLSLETGSLKLANGRVIEKTLYNRRTRQDEPALFVALTFERREVLDSSNIKPMNLIGVDRGENIPAVIALTDPEGCPLSRFKDSLGNPTHILRIGESYKEKQRTIQAKKEVEQRRAGGYSRKYASKAKNLADDMVRNTARDLLYYAVTQDAMLIFENLSRGFGRQGKRTFMAERQYTRMEDWLTAKLAYEGLPSKTYLSKTLAQYTSKTCSNCGFTITSADYDRVLEKLKKTATGWMTTINGKELKVEGQITYYNRYKRQNVVKDLSVELDRLSEESVNNDISSWTKGRSGEALSLLKKRFSHRPVQEKFVCLNCGFETHADEQAALNIARSWLFLRSQEYKKYQTNKTTGNTDKRAFVETWQSFYRKKLKEVWKPAV

SEQ ID NO: 43734 - protein, 979 aa, Artificial Sequence
  CasX Variant
QEIKRINKIRRRLVKDSNTKKAGKTGPMKTLLVRVMTPDLRERLENLRKKPENIPQPISNTSRANLNKLLTDYTEMKKAILHVYWEEFQKDPVGLMSRVAQPASKKIDQNKLKPEMDEKGNLTTAGFACSQCGQPLFVYKLEQVSEKGKAYTNYFGRCNVAEHEKLILLAQLKPEKDSDEAVTYSLGKFGQRALDFYSIHVTKESTHPVKPLAQIAGNRYASGPVGKALSDACMGTIASFLSKYQDIIIEHQKVVKGNQKRLESLRELAGKENLEYPSVTLPPQPHTKEGVDAYNEVIARVRMWVNLNLWQKLKLSRDDAKPLLRLKGFPSFPLVERQANEVDDWWDMVCNVKKLINEKKEDGKVFWQNLAGYKRQEALRPYLSSEEDRKKGKKFARYQLGDLLLHLEKKHGEDWGKVYDEAWERIDKKVEGLSKHIKLEEERRSEDAQSKAALTDWLRAKASFVIEGLKEADKDEFCRCELKLQKWYGDLRGKPFAIEAENSILDISGFSKQYNCAFIWQKDGVKKLNLYLIINYFKGGKLRFKKIKPEAFEANRFYTVINKKSGEIVPMEVNFNFDDPNLIILPLAFGKRQGREFIWNDLLSLETGSLKLANGRVIEKTLYNRRTRQDEPALFVALTFERREVLDSSNIKPMNLIGVDRGENIPAVIALTDPEGCPLSRFKDSLGNPTHILRIGESYKEKQRTIQAKKEVEQRRAGGYSRKYASKAKNLADDMVRNTARDLLYYAVTQDAMLIFENLSRGFGRQGKRTFMAERQYTRMEDWLTAKLAYEGLPSKTYLSKTLAQYTSKTCSNCGFTITSADYDRVLEKLKKTATGWMTTINGKELKVEGQITYYNRYKRQNVVKDLSVELDRLSEESVNNDISSWTKGRSGEALSLLKKRFSHRPVQEKFVCLNCGFETHADEQAALNIARSWLFLRSQEYKKYQTNKTTGNTDKRAFVETWQSFYRKKLKEVWKPAV

SEQ ID NO: 43735 - protein, 979 aa, Artificial Sequence
  CasX Variant
QEIKRINKIRRRLVKDSNTKKAGKTGPMKTLLVRVMTPDLRERLENLRKKPENIPQPISNTSRANLNKLLTDYTEMKKAILHVYWEEFQKDPVGLMSRVAQPASKKIDQNKLKPEMDEKGNLTTAGFACSQCGQPLFVYKLEQVSEKGKAYTNYFGRCNVAEHEKLILLAQLKPEKDSDEAVTYSLGKFGQRALDFYSIHVTKESTHPVKPLAQIAGNRYASGPVGKALSDACMGTIASFLSKYQDIIIEHQKVVKGNQKRLESLRELAGKENLEYPSVTLPPQPHTKEGVDAYNEVIARVRMWVNLNLWQKLKLSRDDAKPLLRLKGFPSFPLVERQANEVDWWPDMVCNVKKLINEKKEDGKVFWQNLAGYKRQEALRPYLSSEEDRKKGKKFARYQLGDLLLHLEKKHGEDWGKVYDEAWERIDKKVEGLSKHIKLEEERRSEDAQSKAALTDWLRAKASFVIEGLKEADKDEFCRCELKLQKWYGDLRGKPFAIEAENSILDISGFSKQYNCAFIWQKDGVKKLNLYLIINYFKGGKLRFKKIKPEAFEANRFYTVINKKSGEIVPMEVNFNFDDPNLIILPLAFGKRQGREFIWNDLLSLETGSLKLANGRVIEKTLYNRRTRQDEPALFVALTFERREVLDSSNIKPMNLIGVDRGENIPAVIALTDPEGCPLSRFKDSLGNPTHILRIGESYKEKQRTIQAKKEVEQRRAGGYSRKYASKAKNLADDMVRNTARDLLYYAVTQDAMLIFENLSRGFGRQGKRTFMAERQYTRMEDWLTAKLAYEGLPSKTYLSKTLAQYTSKTCSNCGFTITSADYDRVLEKLKKTATGWMTTINGKELKVEGQITYYNRYKRQNVVKDLSVELDRLSEESVNNDISSWTKGRSGEALSLLKKRFSHRPVQEKFVCLNCGFETHADEQAALNIARSWLFLRSQEYKKYQTNKTTGNTDKRAFVETWQSFYRKKLKEVWKPAV

SEQ ID NO: 43736 - protein, 978 aa, Artificial Sequence
  CasX Variant
QEIKRINKIRRRLVKDSNTKKAGKTGPMKTLLVRVMTPDLRERLENLRKKPENIPQPISNTSRANLNKLLTDYTEMKKAILHVYWEEFQKDPVGLMSRVAQPASKKIDQNKLKPEMDEKGNLTTAGFACSQCGQPLFVYKLEQVSEKGKAYTNYFGRCNVAEHEKLILLAQLKPEKDSDEAVTYSLGKFGQRALDFYSIHVTKESTHPVKPLAQIAGNRYASGPVGKALSDACMGTIASFLSKYQDIIIEHQKVVKGNQKRLESLRELAGKENLEYPSVTLPPQPHTKEGVDAYNEVIARVRMWVNLNLWQKLKLSRDDAKPLLRLKGFPSFPLVERQANEVDWWDMVCNVKKLINEKKEDGKVFWQNLAGYKRQEALRPYLSSEEDRKKGKKFARTQLGDLLLHLEKKHGEDWGKVYDEAWERIDKKVEGLSKHIKLEEERRSEDAQSKAALTDWLRAKASFVIEGLKEADKDEFCRCELKLQKWYGDLRGKPFAIEAENSILDISGFSKQYNCAFIWQKDGVKKLNLYLIINYFKGGKLRFKKIKPEAFEANRFYTVINKKSGEIVPMEVNFNFDDPNLIILPLAFGKRQGREFIWNDLLSLETGSLKLANGRVIEKTLYNRRTRQDEPALFVALTFERREVLDSSNIKPMNLIGVDRGENIPAVIALTDPEGCPLSRFKDSLGNPTHILRIGESYKEKQRTIQAKKEVEQRRAGGYSRKYASKAKNLADDMVRNTARDLLYYAVTQDAMLIFENLSRGFGRQGKRTFMAERQYTRMEDWLTAKLAYEGLPSKTYLSKTLAQYTSKTCSNCGFTITSADYDRVLEKLKKTATGWMTTINGKELKVEGQITYYNRYKRQNVVKDLSVELDRLSEESVNNDISSWTKGRSGEALSLLKKRFSHRPVQEKFVCLNCGFETHADEQAALNIARSWLFLRSQEYKKYQTNKTTGNTDKRAFVETWQSFYRKKLKEVWKPAV

SEQ ID NO: 43737 - protein, 978 aa, Artificial Sequence
  CasX Variant
QEIKRINKIRRRLVKDSNTKKAGKTGPMKTLLVRVMTPDLRERLENLRKKPENIPQPISNTSRANLNKLLTDYTEMKKAILHVYWEEFQKDPVGLMSRVAQPASKKIDQNKLKPEMDEKGNLTTAGFACSQCGQPLFVYKLEQVSEKGKAYTNYFGRCNVAEHEKLILLAQLKPEKDSDEAVTYSLGKFGQRALDFYSIHVTKESTHPVKPLAQIAGNRYASGPVGKALSDACMGTIASFLSKYQDIIIEHQKVVKGNQKRLESLRELAGKENLEYPSVTLPPQPHTKEGVDAYNEVIARVRMWVNLNLWQKLKLSRDDAKPLLRLKGFPSFPLVERQANEVDWWDMVCNVKKLINEKKEDGKVFWQNLAGYKRQEALRPYLSSEEDRKKGKKFARYQLMDLLLHLEKKHGEDWGKVYDEAWERIDKKVEGLSKHIKLEEERRSEDAQSKAALTDWLRAKASFVIEGLKEADKDEFCRCELKLQKWYGDLRGKPFAIEAENSILDISGFSKQYNCAFIWQKDGVKKLNLYLIINYFKGGKLRFKKIKPEAFEANRFYTVINKKSGEIVPMEVNFNFDDPNLIILPLAFGKRQGREFIWNDLLSLETGSLKLANGRVIEKTLYNRRTRQDEPALFVALTFERREVLDSSNIKPMNLIGVDRGENIPAVIALTDPEGCPLSRFKDSLGNPTHILRIGESYKEKQRTIQAKKEVEQRRAGGYSRKYASKAKNLADDMVRNTARDLLYYAVTQDAMLIFENLSRGFGRQGKRTFMAERQYTRMEDWLTAKLAYEGLPSKTYLSKTLAQYTSKTCSNCGFTITSADYDRVLEKLKKTATGWMTTINGKELKVEGQITYYNRYKRQNVVKDLSVELDRLSEESVNNDISSWTKGRSGEALSLLKKRFSHRPVQEKFVCLNCGFETHADEQAALNIARSWLFLRSQEYKKYQTNKTTGNTDKRAFVETWQSFYRKKLKEVWKPAV

SEQ ID NO: 43738 - protein, 978 aa, Artificial Sequence
  CasX Variant
QEIKRINKIRRRLVKDSNTKKAGKTGPMKTLLVRVMTPDLRERLENLRKKPENIPQPISNTSRANLNKLLTDYTEMKKAILHVYWEEFQKDPVGLMSRVAQPASKKIDQNKLKPEMDEKGNLTTAGFACSQCGQPLFVYKLEQVSEKGKAYTNYFGRCNVAEHEKLILLAQLKPEKDSDEAVTYSLGKFGQRALDFYSIHVTKESTHPVKPLAQIAGNRYASGPVGKALSDACMGTIASFLSKYQDIIIEHQKVVKGNQKRLESLRELAGKENLEYPSVTLPPQPHTKEGVDAYNEVIARVRMWVNLNLWQKLKLSRDDAKPLLRLKGFPSFPLVERQANEVDWWDMVCNVKKLINEKKEDGKVFWQNLAGYKRQEALRPYLSSEEDRKKGKKFARYQLGDLLNHLEKKHGEDWGKVYDEAWERIDKKVEGLSKHIKLEEERRSEDAQSKAALTDWLRAKASFVIEGLKEADKDEFCRCELKLQKWYGDLRGKPFAIEAENSILDISGFSKQYNCAFIWQKDGVKKLNLYLIINYFKGGKLRFKKIKPEAFEANRFYTVINKKSGEIVPMEVNFNFDDPNLIILPLAFGKRQGREFIWNDLLSLETGSLKLANGRVIEKTLYNRRTRQDEPALFVALTFERREVLDSSNIKPMNLIGVDRGENIPAVIALTDPEGCPLSRFKDSLGNPTHILRIGESYKEKQRTIQAKKEVEQRRAGGYSRKYASKAKNLADDMVRNTARDLLYYAVTQDAMLIFENLSRGFGRQGKRTFMAERQYTRMEDWLTAKLAYEGLPSKTYLSKTLAQYTSKTCSNCGFTITSADYDRVLEKLKKTATGWMTTINGKELKVEGQITYYNRYKRQNVVKDLSVELDRLSEESVNNDISSWTKGRSGEALSLLKKRFSHRPVQEKFVCLNCGFETHADEQAALNIARSWLFLRSQEYKKYQTNKTTGNTDKRAFVETWQSFYRKKLKEVWKPAV

SEQ ID NO: 43739 - protein, 978 aa, Artificial Sequence
  CasX Variant
QEIKRINKIRRRLVKDSNTKKAGKTGPMKTLLVRVMTPDLRERLENLRKKPENIPQPISNTSRANLNKLLTDYTEMKKAILHVYWEEFQKDPVGLMSRVAQPASKKIDQNKLKPEMDEKGNLTTAGFACSQCGQPLFVYKLEQVSEKGKAYTNYFGRCNVAEHEKLILLAQLKPEKDSDEAVTYSLGKFGQRALDFYSIHVTKESTHPVKPLAQIAGNRYASGPVGKALSDACMGTIASFLSKYQDIIIEHQKVVKGNQKRLESLRELAGKENLEYPSVTLPPQPHTKEGVDAYNEVIARVRMWVNLNLWQKLKLSRDDAKPLLRLKGFPSFPLVERQANEVDWWDMVCNVKKLINEKKEDGKVFWQNLAGYKRQEALRPYLSSEEDRKKGKKFARYQLGDLLWHLEKKHGEDWGKVYDEAWERIDKKVEGLSKHIKLEEERRSEDAQSKAALTDWLRAKASFVIEGLKEADKDEFCRCELKLQKWYGDLRGKPFAIEAENSILDISGFSKQYNCAFIWQKDGVKKLNLYLIINYFKGGKLRFKKIKPEAFEANRFYTVINKKSGEIVPMEVNFNFDDPNLIILPLAFGKRQGREFIWNDLLSLETGSLKLANGRVIEKTLYNRRTRQDEPALFVALTFERREVLDSSNIKPMNLIGVDRGENIPAVIALTDPEGCPLSRFKDSLGNPTHILRIGESYKEKQRTIQAKKEVEQRRAGGYSRKYASKAKNLADDMVRNTARDLLYYAVTQDAMLIFENLSRGFGRQGKRTFMAERQYTRMEDWLTAKLAYEGLPSKTYLSKTLAQYTSKTCSNCGFTITSADYDRVLEKLKKTATGWMTTINGKELKVEGQITYYNRYKRQNVVKDLSVELDRLSEESVNNDISSWTKGRSGEALSLLKKRFSHRPVQEKFVCLNCGFETHADEQAALNIARSWLFLRSQEYKKYQTNKTTGNTDKRAFVETWQSFYRKKLKEVWKPAV

SEQ ID NO: 43740 - protein, 978 aa, Artificial Sequence
  CasX Variant
QEIKRINKIRRRLVKDSNTKKAGKTGPMKTLLVRVMTPDLRERLENLRKKPENIPQPISNTSRANLNKLLTDYTEMKKAILHVYWEEFQKDPVGLMSRVAQPASKKIDQNKLKPEMDEKGNLTTAGFACSQCGQPLFVYKLEQVSEKGKAYTNYFGRCNVAEHEKLILLAQLKPEKDSDEAVTYSLGKFGQRALDFYSIHVTKESTHPVKPLAQIAGNRYASGPVGKALSDACMGTIASFLSKYQDIIIEHQKVVKGNQKRLESLRELAGKENLEYPSVTLPPQPHTKEGVDAYNEVIARVRMWVNLNLWQKLKLSRDDAKPLLRLKGFPSFPLVERQANEVDWWDMVCNVKKLINEKKEDGKVFWQNLAGYKRQEALRPYLSSEEDRKKGKKFARYQLGDLLLHLYKKHGEDWGKVYDEAWERIDKKVEGLSKHIKLEEERRSEDAQSKAALTDWLRAKASFVIEGLKEADKDEFCRCELKLQKWYGDLRGKPFAIEAENSILDISGFSKQYNCAFIWQKDGVKKLNLYLIINYFKGGKLRFKKIKPEAFEANRFYTVINKKSGEIVPMEVNFNFDDPNLIILPLAFGKRQGREFIWNDLLSLETGSLKLANGRVIEKTLYNRRTRQDEPALFVALTFERREVLDSSNIKPMNLIGVDRGENIPAVIALTDPEGCPLSRFKDSLGNPTHILRIGESYKEKQRTIQAKKEVEQRRAGGYSRKYASKAKNLADDMVRNTARDLLYYAVTQDAMLIFENLSRGFGRQGKRTFMAERQYTRMEDWLTAKLAYEGLPSKTYLSKTLAQYTSKTCSNCGFTITSADYDRVLEKLKKTATGWMTTINGKELKVEGQITYYNRYKRQNVVKDLSVELDRLSEESVNNDISSWTKGRSGEALSLLKKRFSHRPVQEKFVCLNCGFETHADEQAALNIARSWLFLRSQEYKKYQTNKTTGNTDKRAFVETWQSFYRKKLKEVWKPAV

SEQ ID NO: 43741 - protein, 978 aa, Artificial Sequence
  CasX Variant
QEIKRINKIRRRLVKDSNTKKAGKTGPMKTLLVRVMTPDLRERLENLRKKPENIPQPISNTSRANLNKLLTDYTEMKKAILHVYWEEFQKDPVGLMSRVAQPASKKIDQNKLKPEMDEKGNLTTAGFACSQCGQPLFVYKLEQVSEKGKAYTNYFGRCNVAEHEKLILLAQLKPEKDSDEAVTYSLGKFGQRALDFYSIHVTKESTHPVKPLAQIAGNRYASGPVGKALSDACMGTIASFLSKYQDIIIEHQKVVKGNQKRLESLRELAGKENLEYPSVTLPPQPHTKEGVDAYNEVIARVRMWVNLNLWQKLKLSRDDAKPLLRLKGFPSFPLVERQANEVDWWDMVCNVKKLINEKKEDGKVFWQNLAGYKRQEALRPYLSSEEDRKKGKKFARYQLGDLLLHLEKKHPEDWGKVYDEAWERIDKKVEGLSKHIKLEEERRSEDAQSKAALTDWLRAKASFVIEGLKEADKDEFCRCELKLQKWYGDLRGKPFAIEAENSILDISGFSKQYNCAFIWQKDGVKKLNLYLIINYFKGGKLRFKKIKPEAFEANRFYTVINKKSGEIVPMEVNFNFDDPNLIILPLAFGKRQGREFIWNDLLSLETGSLKLANGRVIEKTLYNRRTRQDEPALFVALTFERREVLDSSNIKPMNLIGVDRGENIPAVIALTDPEGCPLSRFKDSLGNPTHILRIGESYKEKQRTIQAKKEVEQRRAGGYSRKYASKAKNLADDMVRNTARDLLYYAVTQDAMLIFENLSRGFGRQGKRTFMAERQYTRMEDWLTAKLAYEGLPSKTYLSKTLAQYTSKTCSNCGFTITSADYDRVLEKLKKTATGWMTTINGKELKVEGQITYYNRYKRQNVVKDLSVELDRLSEESVNNDISSWTKGRSGEALSLLKKRFSHRPVQEKFVCLNCGFETHADEQAALNIARSWLFLRSQEYKKYQTNKTTGNTDKRAFVETWQSFYRKKLKEVWKPAV

SEQ ID NO: 43742 - protein, 979 aa, Artificial Sequence
  CasX Variant
QEIKRINKIRRRLVKDSNTKKAGKTGPMKTLLVRVMTPDLRERLENLRKKPENIPQPISNTSRANLNKLLTDYTEMKKAILHVYWEEFQKDPVGLMSRVAQPASKKIDQNKLKPEMDEKGNLTTAGFACSQCGQPLFVYKLEQVSEKGKAYTNYFGRCNVAEHEKLILLAQLKPEKDSDEAVTYSLGKFGQRALDFYSIHVTKESTHPVKPLAQIAGNRYASGPVGKALSDACMGTIASFLSKYQDIIIEHQKVVKGNQKRLESLRELAGKENLEYPSVTLPPQPHTKEGVDAYNEVIARVRMWVNLNLWQKLKLSRDDAKPLLRLKGFPSFPLVERQANEVDWWDMVCNVKKLINEKKEDGKVFWQNLAGYKRQEALRPYLSSEEDRKKGKKFARYQLGDLLLHLEKKHEGEDWGKVYDEAWERIDKKVEGLSKHIKLEEERRSEDAQSKAALTDWLRAKASFVIEGLKEADKDEFCRCELKLQKWYGDLRGKPFAIEAENSILDISGFSKQYNCAFIWQKDGVKKLNLYLIINYFKGGKLRFKKIKPEAFEANRFYTVINKKSGEIVPMEVNFNFDDPNLIILPLAFGKRQGREFIWNDLLSLETGSLKLANGRVIEKTLYNRRTRQDEPALFVALTFERREVLDSSNIKPMNLIGVDRGENIPAVIALTDPEGCPLSRFKDSLGNPTHILRIGESYKEKQRTIQAKKEVEQRRAGGYSRKYASKAKNLADDMVRNTARDLLYYAVTQDAMLIFENLSRGFGRQGKRTFMAERQYTRMEDWLTAKLAYEGLPSKTYLSKTLAQYTSKTCSNCGFTITSADYDRVLEKLKKTATGWMTTINGKELKVEGQITYYNRYKRQNVVKDLSVELDRLSEESVNNDISSWTKGRSGEALSLLKKRFSHRPVQEKFVCLNCGFETHADEQAALNIARSWLFLRSQEYKKYQTNKTTGNTDKRAFVETWQSFYRKKLKEVWKPAV

SEQ ID NO: 43743 - protein, 979 aa, Artificial Sequence
  CasX Variant
QEIKRINKIRRRLVKDSNTKKAGKTGPMKTLLVRVMTPDLRERLENLRKKPENIPQPISNTSRANLNKLLTDYTEMKKAILHVYWEEFQKDPVGLMSRVAQPASKKIDQNKLKPEMDEKGNLTTAGFACSQCGQPLFVYKLEQVSEKGKAYTNYFGRCNVAEHEKLILLAQLKPEKDSDEAVTYSLGKFGQRALDFYSIHVTKESTHPVKPLAQIAGNRYASGPVGKALSDACMGTIASFLSKYQDIIIEHQKVVKGNQKRLESLRELAGKENLEYPSVTLPPQPHTKEGVDAYNEVIARVRMWVNLNLWQKLKLSRDDAKPLLRLKGFPSFPLVERQANEVDWWDMVCNVKKLINEKKEDGKVFWQNLAGYKRQEALRPYLSSEEDRKKGKKFARYQLGDLLLHLEKKHGERDWGKVYDEAWERIDKKVEGLSKHIKLEEERRSEDAQSKAALTDWLRAKASFVIEGLKEADKDEFCRCELKLQKWYGDLRGKPFAIEAENSILDISGFSKQYNCAFIWQKDGVKKLNLYLIINYFKGGKLRFKKIKPEAFEANRFYTVINKKSGEIVPMEVNFNFDDPNLIILPLAFGKRQGREFIWNDLLSLETGSLKLANGRVIEKTLYNRRTRQDEPALFVALTFERREVLDSSNIKPMNLIGVDRGENIPAVIALTDPEGCPLSRFKDSLGNPTHILRIGESYKEKQRTIQAKKEVEQRRAGGYSRKYASKAKNLADDMVRNTARDLLYYAVTQDAMLIFENLSRGFGRQGKRTFMAERQYTRMEDWLTAKLAYEGLPSKTYLSKTLAQYTSKTCSNCGFTITSADYDRVLEKLKKTATGWMTTINGKELKVEGQITYYNRYKRQNVVKDLSVELDRLSEESVNNDISSWTKGRSGEALSLLKKRFSHRPVQEKFVCLNCGFETHADEQAALNIARSWLFLRSQEYKKYQTNKTTGNTDKRAFVETWQSFYRKKLKEVWKPAV

SEQ ID NO: 43744 - protein, 979 aa, Artificial Sequence
  CasX Variant
QEIKRINKIRRRLVKDSNTKKAGKTGPMKTLLVRVMTPDLRERLENLRKKPENIPQPISNTSRANLNKLLTDYTEMKKAILHVYWEEFQKDPVGLMSRVAQPASKKIDQNKLKPEMDEKGNLTTAGFACSQCGQPLFVYKLEQVSEKGKAYTNYFGRCNVAEHEKLILLAQLKPEKDSDEAVTYSLGKFGQRALDFYSIHVTKESTHPVKPLAQIAGNRYASGPVGKALSDACMGTIASFLSKYQDIIIEHQKVVKGNQKRLESLRELAGKENLEYPSVTLPPQPHTKEGVDAYNEVIARVRMWVNLNLWQKLKLSRDDAKPLLRLKGFPSFPLVERQANEVDWWDMVCNVKKLINEKKEDGKVFWQNLAGYKRQEALRPYLSSEEDRKKGKKFARYQLGDLLLHLEKKHGEWDWGKVYDEAWERIDKKVEGLSKHIKLEEERRSEDAQSKAALTDWLRAKASFVIEGLKEADKDEFCRCELKLQKWYGDLRGKPFAIEAENSILDISGFSKQYNCAFIWQKDGVKKLNLYLIINYFKGGKLRFKKIKPEAFEANRFYTVINKKSGEIVPMEVNFNFDDPNLIILPLAFGKRQGREFIWNDLLSLETGSLKLANGRVIEKTLYNRRTRQDEPALFVALTFERREVLDSSNIKPMNLIGVDRGENIPAVIALTDPEGCPLSRFKDSLGNPTHILRIGESYKEKQRTIQAKKEVEQRRAGGYSRKYASKAKNLADDMVRNTARDLLYYAVTQDAMLIFENLSRGFGRQGKRTFMAERQYTRMEDWLTAKLAYEGLPSKTYLSKTLAQYTSKTCSNCGFTITSADYDRVLEKLKKTATGWMTTINGKELKVEGQITYYNRYKRQNVVKDLSVELDRLSEESVNNDISSWTKGRSGEALSLLKKRFSHRPVQEKFVCLNCGFETHADEQAALNIARSWLFLRSQEYKKYQTNKTTGNTDKRAFVETWQSFYRKKLKEVWKPAV

SEQ ID NO: 43745 - protein, 979 aa, Artificial Sequence
  CasX Variant
QEIKRINKIRRRLVKDSNTKKAGKTGPMKTLLVRVMTPDLRERLENLRKKPENIPQPISNTSRANLNKLLTDYTEMKKAILHVYWEEFQKDPVGLMSRVAQPASKKIDQNKLKPEMDEKGNLTTAGFACSQCGQPLFVYKLEQVSEKGKAYTNYFGRCNVAEHEKLILLAQLKPEKDSDEAVTYSLGKFGQRALDFYSIHVTKESTHPVKPLAQIAGNRYASGPVGKALSDACMGTIASFLSKYQDIIIEHQKVVKGNQKRLESLRELAGKENLEYPSVTLPPQPHTKEGVDAYNEVIARVRMWVNLNLWQKLKLSRDDAKPLLRLKGFPSFPLVERQANEVDWWDMVCNVKKLINEKKEDGKVFWQNLAGYKRQEALRPYLSSEEDRKKGKKFARYQLGDLLLHLEKKHGEYDWGKVYDEAWERIDKKVEGLSKHIKLEEERRSEDAQSKAALTDWLRAKASFVIEGLKEADKDEFCRCELKLQKWYGDLRGKPFAIEAENSILDISGFSKQYNCAFIWQKDGVKKLNLYLIINYFKGGKLRFKKIKPEAFEANRFYTVINKKSGEIVPMEVNFNFDDPNLIILPLAFGKRQGREFIWNDLLSLETGSLKLANGRVIEKTLYNRRTRQDEPALFVALTFERREVLDSSNIKPMNLIGVDRGENIPAVIALTDPEGCPLSRFKDSLGNPTHILRIGESYKEKQRTIQAKKEVEQRRAGGYSRKYASKAKNLADDMVRNTARDLLYYAVTQDAMLIFENLSRGFGRQGKRTFMAERQYTRMEDWLTAKLAYEGLPSKTYLSKTLAQYTSKTCSNCGFTITSADYDRVLEKLKKTATGWMTTINGKELKVEGQITYYNRYKRQNVVKDLSVELDRLSEESVNNDISSWTKGRSGEALSLLKKRFSHRPVQEKFVCLNCGFETHADEQAALNIARSWLFLRSQEYKKYQTNKTTGNTDKRAFVETWQSFYRKKLKEVWKPAV

SEQ ID NO: 43746 - protein, 979 aa, Artificial Sequence
  CasX Variant
QEIKRINKIRRRLVKDSNTKKAGKTGPMKTLLVRVMTPDLRERLENLRKKPENIPQPISNTSRANLNKLLTDYTEMKKAILHVYWEEFQKDPVGLMSRVAQPASKKIDQNKLKPEMDEKGNLTTAGFACSQCGQPLFVYKLEQVSEKGKAYTNYFGRCNVAEHEKLILLAQLKPEKDSDEAVTYSLGKFGQRALDFYSIHVTKESTHPVKPLAQIAGNRYASGPVGKALSDACMGTIASFLSKYQDIIIEHQKVVKGNQKRLESLRELAGKENLEYPSVTLPPQPHTKEGVDAYNEVIARVRMWVNLNLWQKLKLSRDDAKPLLRLKGFPSFPLVERQANEVDWWDMVCNVKKLINEKKEDGKVFWQNLAGYKRQEALRPYLSSEEDRKKGKKFARYQLGDLLLHLEKKHGEDYWGKVYDEAWERIDKKVEGLSKHIKLEEERRSEDAQSKAALTDWLRAKASFVIEGLKEADKDEFCRCELKLQKWYGDLRGKPFAIEAENSILDISGFSKQYNCAFIWQKDGVKKLNLYLIINYFKGGKLRFKKIKPEAFEANRFYTVINKKSGEIVPMEVNFNFDDPNLIILPLAFGKRQGREFIWNDLLSLETGSLKLANGRVIEKTLYNRRTRQDEPALFVALTFERREVLDSSNIKPMNLIGVDRGENIPAVIALTDPEGCPLSRFKDSLGNPTHILRIGESYKEKQRTIQAKKEVEQRRAGGYSRKYASKAKNLADDMVRNTARDLLYYAVTQDAMLIFENLSRGFGRQGKRTFMAERQYTRMEDWLTAKLAYEGLPSKTYLSKTLAQYTSKTCSNCGFTITSADYDRVLEKLKKTATGWMTTINGKELKVEGQITYYNRYKRQNVVKDLSVELDRLSEESVNNDISSWTKGRSGEALSLLKKRFSHRPVQEKFVCLNCGFETHADEQAALNIARSWLFLRSQEYKKYQTNKTTGNTDKRAFVETWQSFYRKKLKEVWKPAV

SEQ ID NO: 43747 - protein, 978 aa, Artificial Sequence
  CasX Variant
QEIKRINKIRRRLVKDSNTKKAGKTGPMKTLLVRVMTPDLRERLENLRKKPENIPQPISNTSRANLNKLLTDYTEMKKAILHVYWEEFQKDPVGLMSRVAQPASKKIDQNKLKPEMDEKGNLTTAGFACSQCGQPLFVYKLEQVSEKGKAYTNYFGRCNVAEHEKLILLAQLKPEKDSDEAVTYSLGKFGQRALDFYSIHVTKESTHPVKPLAQIAGNRYASGPVGKALSDACMGTIASFLSKYQDIIIEHQKVVKGNQKRLESLRELAGKENLEYPSVTLPPQPHTKEGVDAYNEVIARVRMWVNLNLWQKLKLSRDDAKPLLRLKGFPSFPLVERQANEVDWWDMVCNVKKLINEKKEDGKVFWQNLAGYKRQEALRPYLSSEEDRKKGKKFARYQLGDLLLHLEKKHGEDRGKVYDEAWERIDKKVEGLSKHIKLEEERRSEDAQSKAALTDWLRAKASFVIEGLKEADKDEFCRCELKLQKWYGDLRGKPFAIEAENSILDISGFSKQYNCAFIWQKDGVKKLNLYLIINYFKGGKLRFKKIKPEAFEANRFYTVINKKSGEIVPMEVNFNFDDPNLIILPLAFGKRQGREFIWNDLLSLETGSLKLANGRVIEKTLYNRRTRQDEPALFVALTFERREVLDSSNIKPMNLIGVDRGENIPAVIALTDPEGCPLSRFKDSLGNPTHILRIGESYKEKQRTIQAKKEVEQRRAGGYSRKYASKAKNLADDMVRNTARDLLYYAVTQDAMLIFENLSRGFGRQGKRTFMAERQYTRMEDWLTAKLAYEGLPSKTYLSKTLAQYTSKTCSNCGFTITSADYDRVLEKLKKTATGWMTTINGKELKVEGQITYYNRYKRQNVVKDLSVELDRLSEESVNNDISSWTKGRSGEALSLLKKRFSHRPVQEKFVCLNCGFETHADEQAALNIARSWLFLRSQEYKKYQTNKTTGNTDKRAFVETWQSFYRKKLKEVWKPAV

SEQ ID NO: 43748 - protein, 978 aa, Artificial Sequence
  CasX Variant
QEIKRINKIRRRLVKDSNTKKAGKTGPMKTLLVRVMTPDLRERLENLRKKPENIPQPISNTSRANLNKLLTDYTEMKKAILHVYWEEFQKDPVGLMSRVAQPASKKIDQNKLKPEMDEKGNLTTAGFACSQCGQPLFVYKLEQVSEKGKAYTNYFGRCNVAEHEKLILLAQLKPEKDSDEAVTYSLGKFGQRALDFYSIHVTKESTHPVKPLAQIAGNRYASGPVGKALSDACMGTIASFLSKYQDIIIEHQKVVKGNQKRLESLRELAGKENLEYPSVTLPPQPHTKEGVDAYNEVIARVRMWVNLNLWQKLKLSRDDAKPLLRLKGFPSFPLVERQANEVDWWDMVCNVKKLINEKKEDGKVFWQNLAGYKRQEALRPYLSSEEDRKKGKKFARYQLGDLLLHLEKKHGEDWGDVYDEAWERIDKKVEGLSKHIKLEEERRSEDAQSKAALTDWLRAKASFVIEGLKEADKDEFCRCELKLQKWYGDLRGKPFAIEAENSILDISGFSKQYNCAFIWQKDGVKKLNLYLIINYFKGGKLRFKKIKPEAFEANRFYTVINKKSGEIVPMEVNFNFDDPNLIILPLAFGKRQGREFIWNDLLSLETGSLKLANGRVIEKTLYNRRTRQDEPALFVALTFERREVLDSSNIKPMNLIGVDRGENIPAVIALTDPEGCPLSRFKDSLGNPTHILRIGESYKEKQRTIQAKKEVEQRRAGGYSRKYASKAKNLADDMVRNTARDLLYYAVTQDAMLIFENLSRGFGRQGKRTFMAERQYTRMEDWLTAKLAYEGLPSKTYLSKTLAQYTSKTCSNCGFTITSADYDRVLEKLKKTATGWMTTINGKELKVEGQITYYNRYKRQNVVKDLSVELDRLSEESVNNDISSWTKGRSGEALSLLKKRFSHRPVQEKFVCLNCGFETHADEQAALNIARSWLFLRSQEYKKYQTNKTTGNTDKRAFVETWQSFYRKKLKEVWKPAV

SEQ ID NO: 43749 - protein, 978 aa, Artificial Sequence
  CasX Variant
QEIKRINKIRRRLVKDSNTKKAGKTGPMKTLLVRVMTPDLRERLENLRKKPENIPQPISNTSRANLNKLLTDYTEMKKAILHVYWEEFQKDPVGLMSRVAQPASKKIDQNKLKPEMDEKGNLTTAGFACSQCGQPLFVYKLEQVSEKGKAYTNYFGRCNVAEHEKLILLAQLKPEKDSDEAVTYSLGKFGQRALDFYSIHVTKESTHPVKPLAQIAGNRYASGPVGKALSDACMGTIASFLSKYQDIIIEHQKVVKGNQKRLESLRELAGKENLEYPSVTLPPQPHTKEGVDAYNEVIARVRMWVNLNLWQKLKLSRDDAKPLLRLKGFPSFPLVERQANEVDWWDMVCNVKKLINEKKEDGKVFWQNLAGYKRQEALRPYLSSEEDRKKGKKFARYQLGDLLLHLEKKHGEDWGPVYDEAWERIDKKVEGLSKHIKLEEERRSEDAQSKAALTDWLRAKASFVIEGLKEADKDEFCRCELKLQKWYGDLRGKPFAIEAENSILDISGFSKQYNCAFIWQKDGVKKLNLYLIINYFKGGKLRFKKIKPEAFEANRFYTVINKKSGEIVPMEVNFNFDDPNLIILPLAFGKRQGREFIWNDLLSLETGSLKLANGRVIEKTLYNRRTRQDEPALFVALTFERREVLDSSNIKPMNLIGVDRGENIPAVIALTDPEGCPLSRFKDSLGNPTHILRIGESYKEKQRTIQAKKEVEQRRAGGYSRKYASKAKNLADDMVRNTARDLLYYAVTQDAMLIFENLSRGFGRQGKRTFMAERQYTRMEDWLTAKLAYEGLPSKTYLSKTLAQYTSKTCSNCGFTITSADYDRVLEKLKKTATGWMTTINGKELKVEGQITYYNRYKRQNVVKDLSVELDRLSEESVNNDISSWTKGRSGEALSLLKKRFSHRPVQEKFVCLNCGFETHADEQAALNIARSWLFLRSQEYKKYQTNKTTGNTDKRAFVETWQSFYRKKLKEVWKPAV

SEQ ID NO: 43750 - protein, 978 aa, Artificial Sequence
  CasX Variant
QEIKRINKIRRRLVKDSNTKKAGKTGPMKTLLVRVMTPDLRERLENLRKKPENIPQPISNTSRANLNKLLTDYTEMKKAILHVYWEEFQKDPVGLMSRVAQPASKKIDQNKLKPEMDEKGNLTTAGFACSQCGQPLFVYKLEQVSEKGKAYTNYFGRCNVAEHEKLILLAQLKPEKDSDEAVTYSLGKFGQRALDFYSIHVTKESTHPVKPLAQIAGNRYASGPVGKALSDACMGTIASFLSKYQDIIIEHQKVVKGNQKRLESLRELAGKENLEYPSVTLPPQPHTKEGVDAYNEVIARVRMWVNLNLWQKLKLSRDDAKPLLRLKGFPSFPLVERQANEVDWWDMVCNVKKLINEKKEDGKVFWQNLAGYKRQEALRPYLSSEEDRKKGKKFARYQLGDLLLHLEKKHGEDWGKLYDEAWERIDKKVEGLSKHIKLEEERRSEDAQSKAALTDWLRAKASFVIEGLKEADKDEFCRCELKLQKWYGDLRGKPFAIEAENSILDISGFSKQYNCAFIWQKDGVKKLNLYLIINYFKGGKLRFKKIKPEAFEANRFYTVINKKSGEIVPMEVNFNFDDPNLIILPLAFGKRQGREFIWNDLLSLETGSLKLANGRVIEKTLYNRRTRQDEPALFVALTFERREVLDSSNIKPMNLIGVDRGENIPAVIALTDPEGCPLSRFKDSLGNPTHILRIGESYKEKQRTIQAKKEVEQRRAGGYSRKYASKAKNLADDMVRNTARDLLYYAVTQDAMLIFENLSRGFGRQGKRTFMAERQYTRMEDWLTAKLAYEGLPSKTYLSKTLAQYTSKTCSNCGFTITSADYDRVLEKLKKTATGWMTTINGKELKVEGQITYYNRYKRQNVVKDLSVELDRLSEESVNNDISSWTKGRSGEALSLLKKRFSHRPVQEKFVCLNCGFETHADEQAALNIARSWLFLRSQEYKKYQTNKTTGNTDKRAFVETWQSFYRKKLKEVWKPAV

SEQ ID NO: 43751 - protein, 978 aa, Artificial Sequence
  CasX Variant
QEIKRINKIRRRLVKDSNTKKAGKTGPMKTLLVRVMTPDLRERLENLRKKPENIPQPISNTSRANLNKLLTDYTEMKKAILHVYWEEFQKDPVGLMSRVAQPASKKIDQNKLKPEMDEKGNLTTAGFACSQCGQPLFVYKLEQVSEKGKAYTNYFGRCNVAEHEKLILLAQLKPEKDSDEAVTYSLGKFGQRALDFYSIHVTKESTHPVKPLAQIAGNRYASGPVGKALSDACMGTIASFLSKYQDIIIEHQKVVKGNQKRLESLRELAGKENLEYPSVTLPPQPHTKEGVDAYNEVIARVRMWVNLNLWQKLKLSRDDAKPLLRLKGFPSFPLVERQANEVDWWDMVCNVKKLINEKKEDGKVFWQNLAGYKRQEALRPYLSSEEDRKKGKKFARYQLGDLLLHLEKKHGEDWGKVYGEAWERIDKKVEGLSKHIKLEEERRSEDAQSKAALTDWLRAKASFVIEGLKEADKDEFCRCELKLQKWYGDLRGKPFAIEAENSILDISGFSKQYNCAFIWQKDGVKKLNLYLIINYFKGGKLRFKKIKPEAFEANRFYTVINKKSGEIVPMEVNFNFDDPNLIILPLAFGKRQGREFIWNDLLSLETGSLKLANGRVIEKTLYNRRTRQDEPALFVALTFERREVLDSSNIKPMNLIGVDRGENIPAVIALTDPEGCPLSRFKDSLGNPTHILRIGESYKEKQRTIQAKKEVEQRRAGGYSRKYASKAKNLADDMVRNTARDLLYYAVTQDAMLIFENLSRGFGRQGKRTFMAERQYTRMEDWLTAKLAYEGLPSKTYLSKTLAQYTSKTCSNCGFTITSADYDRVLEKLKKTATGWMTTINGKELKVEGQITYYNRYKRQNVVKDLSVELDRLSEESVNNDISSWTKGRSGEALSLLKKRFSHRPVQEKFVCLNCGFETHADEQAALNIARSWLFLRSQEYKKYQTNKTTGNTDKRAFVETWQSFYRKKLKEVWKPAV

SEQ ID NO: 43752 - protein, 978 aa, Artificial Sequence
  CasX Variant
QEIKRINKIRRRLVKDSNTKKAGKTGPMKTLLVRVMTPDLRERLENLRKKPENIPQPISNTSRANLNKLLTDYTEMKKAILHVYWEEFQKDPVGLMSRVAQPASKKIDQNKLKPEMDEKGNLTTAGFACSQCGQPLFVYKLEQVSEKGKAYTNYFGRCNVAEHEKLILLAQLKPEKDSDEAVTYSLGKFGQRALDFYSIHVTKESTHPVKPLAQIAGNRYASGPVGKALSDACMGTIASFLSKYQDIIIEHQKVVKGNQKRLESLRELAGKENLEYPSVTLPPQPHTKEGVDAYNEVIARVRMWVNLNLWQKLKLSRDDAKPLLRLKGFPSFPLVERQANEVDWWDMVCNVKKLINEKKEDGKVFWQNLAGYKRQEALRPYLSSEEDRKKGKKFARYQLGDLLLHLEKKHGEDWGKVYDEAWERIDKKVEGLSKHQKLEEERRSEDAQSKAALTDWLRAKASFVIEGLKEADKDEFCRCELKLQKWYGDLRGKPFAIEAENSILDISGFSKQYNCAFIWQKDGVKKLNLYLIINYFKGGKLRFKKIKPEAFEANRFYTVINKKSGEIVPMEVNFNFDDPNLIILPLAFGKRQGREFIWNDLLSLETGSLKLANGRVIEKTLYNRRTRQDEPALFVALTFERREVLDSSNIKPMNLIGVDRGENIPAVIALTDPEGCPLSRFKDSLGNPTHILRIGESYKEKQRTIQAKKEVEQRRAGGYSRKYASKAKNLADDMVRNTARDLLYYAVTQDAMLIFENLSRGFGRQGKRTFMAERQYTRMEDWLTAKLAYEGLPSKTYLSKTLAQYTSKTCSNCGFTITSADYDRVLEKLKKTATGWMTTINGKELKVEGQITYYNRYKRQNVVKDLSVELDRLSEESVNNDISSWTKGRSGEALSLLKKRFSHRPVQEKFVCLNCGFETHADEQAALNIARSWLFLRSQEYKKYQTNKTTGNTDKRAFVETWQSFYRKKLKEVWKPAV

SEQ ID NO: 43753 - protein, 978 aa, Artificial Sequence
  CasX Variant
QEIKRINKIRRRLVKDSNTKKAGKTGPMKTLLVRVMTPDLRERLENLRKKPENIPQPISNTSRANLNKLLTDYTEMKKAILHVYWEEFQKDPVGLMSRVAQPASKKIDQNKLKPEMDEKGNLTTAGFACSQCGQPLFVYKLEQVSEKGKAYTNYFGRCNVAEHEKLILLAQLKPEKDSDEAVTYSLGKFGQRALDFYSIHVTKESTHPVKPLAQIAGNRYASGPVGKALSDACMGTIASFLSKYQDIIIEHQKVVKGNQKRLESLRELAGKENLEYPSVTLPPQPHTKEGVDAYNEVIARVRMWVNLNLWQKLKLSRDDAKPLLRLKGFPSFPLVERQANEVDWWDMVCNVKKLINEKKEDGKVFWQNLAGYKRQEALRPYLSSEEDRKKGKKFARYQLGDLLLHLEKKHGEDWGKVYDEAWERIDKKVEGLSKHIKLEEEDRSEDAQSKAALTDWLRAKASFVIEGLKEADKDEFCRCELKLQKWYGDLRGKPFAIEAENSILDISGFSKQYNCAFIWQKDGVKKLNLYLIINYFKGGKLRFKKIKPEAFEANRFYTVINKKSGEIVPMEVNFNFDDPNLIILPLAFGKRQGREFIWNDLLSLETGSLKLANGRVIEKTLYNRRTRQDEPALFVALTFERREVLDSSNIKPMNLIGVDRGENIPAVIALTDPEGCPLSRFKDSLGNPTHILRIGESYKEKQRTIQAKKEVEQRRAGGYSRKYASKAKNLADDMVRNTARDLLYYAVTQDAMLIFENLSRGFGRQGKRTFMAERQYTRMEDWLTAKLAYEGLPSKTYLSKTLAQYTSKTCSNCGFTITSADYDRVLEKLKKTATGWMTTINGKELKVEGQITYYNRYKRQNVVKDLSVELDRLSEESVNNDISSWTKGRSGEALSLLKKRFSHRPVQEKFVCLNCGFETHADEQAALNIARSWLFLRSQEYKKYQTNKTTGNTDKRAFVETWQSFYRKKLKEVWKPAV

SEQ ID NO: 43754 - protein, 978 aa, Artificial Sequence
  CasX Variant
QEIKRINKIRRRLVKDSNTKKAGKTGPMKTLLVRVMTPDLRERLENLRKKPENIPQPISNTSRANLNKLLTDYTEMKKAILHVYWEEFQKDPVGLMSRVAQPASKKIDQNKLKPEMDEKGNLTTAGFACSQCGQPLFVYKLEQVSEKGKAYTNYFGRCNVAEHEKLILLAQLKPEKDSDEAVTYSLGKFGQRALDFYSIHVTKESTHPVKPLAQIAGNRYASGPVGKALSDACMGTIASFLSKYQDIIIEHQKVVKGNQKRLESLRELAGKENLEYPSVTLPPQPHTKEGVDAYNEVIARVRMWVNLNLWQKLKLSRDDAKPLLRLKGFPSFPLVERQANEVDWWDMVCNVKKLINEKKEDGKVFWQNLAGYKRQEALRPYLSSEEDRKKGKKFARYQLGDLLLHLEKKHGEDWGKVYDEAWERIDKKVEGLSKHIKLEEERRSEDAQSKAATTDWLRAKASFVIEGLKEADKDEFCRCELKLQKWYGDLRGKPFAIEAENSILDISGFSKQYNCAFIWQKDGVKKLNLYLIINYFKGGKLRFKKIKPEAFEANRFYTVINKKSGEIVPMEVNFNFDDPNLIILPLAFGKRQGREFIWNDLLSLETGSLKLANGRVIEKTLYNRRTRQDEPALFVALTFERREVLDSSNIKPMNLIGVDRGENIPAVIALTDPEGCPLSRFKDSLGNPTHILRIGESYKEKQRTIQAKKEVEQRRAGGYSRKYASKAKNLADDMVRNTARDLLYYAVTQDAMLIFENLSRGFGRQGKRTFMAERQYTRMEDWLTAKLAYEGLPSKTYLSKTLAQYTSKTCSNCGFTITSADYDRVLEKLKKTATGWMTTINGKELKVEGQITYYNRYKRQNVVKDLSVELDRLSEESVNNDISSWTKGRSGEALSLLKKRFSHRPVQEKFVCLNCGFETHADEQAALNIARSWLFLRSQEYKKYQTNKTTGNTDKRAFVETWQSFYRKKLKEVWKPAV

SEQ ID NO: 43755 - protein, 978 aa, Artificial Sequence
  CasX Variant
QEIKRINKIRRRLVKDSNTKKAGKTGPMKTLLVRVMTPDLRERLENLRKKPENIPQPISNTSRANLNKLLTDYTEMKKAILHVYWEEFQKDPVGLMSRVAQPASKKIDQNKLKPEMDEKGNLTTAGFACSQCGQPLFVYKLEQVSEKGKAYTNYFGRCNVAEHEKLILLAQLKPEKDSDEAVTYSLGKFGQRALDFYSIHVTKESTHPVKPLAQIAGNRYASGPVGKALSDACMGTIASFLSKYQDIIIEHQKVVKGNQKRLESLRELAGKENLEYPSVTLPPQPHTKEGVDAYNEVIARVRMWVNLNLWQKLKLSRDDAKPLLRLKGFPSFPLVERQANEVDWWDMVCNVKKLINEKKEDGKVFWQNLAGYKRQEALRPYLSSEEDRKKGKKFARYQLGDLLLHLEKKHGEDWGKVYDEAWERIDKKVEGLSKHIKLEEERRSEDAQSKAALTDWLRAKTSFVIEGLKEADKDEFCRCELKLQKWYGDLRGKPFAIEAENSILDISGFSKQYNCAFIWQKDGVKKLNLYLIINYFKGGKLRFKKIKPEAFEANRFYTVINKKSGEIVPMEVNFNFDDPNLIILPLAFGKRQGREFIWNDLLSLETGSLKLANGRVIEKTLYNRRTRQDEPALFVALTFERREVLDSSNIKPMNLIGVDRGENIPAVIALTDPEGCPLSRFKDSLGNPTHILRIGESYKEKQRTIQAKKEVEQRRAGGYSRKYASKAKNLADDMVRNTARDLLYYAVTQDAMLIFENLSRGFGRQGKRTFMAERQYTRMEDWLTAKLAYEGLPSKTYLSKTLAQYTSKTCSNCGFTITSADYDRVLEKLKKTATGWMTTINGKELKVEGQITYYNRYKRQNVVKDLSVELDRLSEESVNNDISSWTKGRSGEALSLLKKRFSHRPVQEKFVCLNCGFETHADEQAALNIARSWLFLRSQEYKKYQTNKTTGNTDKRAFVETWQSFYRKKLKEVWKPAV

SEQ ID NO: 43756 - protein, 978 aa, Artificial Sequence
  CasX Variant
QEIKRINKIRRRLVKDSNTKKAGKTGPMKTLLVRVMTPDLRERLENLRKKPENIPQPISNTSRANLNKLLTDYTEMKKAILHVYWEEFQKDPVGLMSRVAQPASKKIDQNKLKPEMDEKGNLTTAGFACSQCGQPLFVYKLEQVSEKGKAYTNYFGRCNVAEHEKLILLAQLKPEKDSDEAVTYSLGKFGQRALDFYSIHVTKESTHPVKPLAQIAGNRYASGPVGKALSDACMGTIASFLSKYQDIIIEHQKVVKGNQKRLESLRELAGKENLEYPSVTLPPQPHTKEGVDAYNEVIARVRMWVNLNLWQKLKLSRDDAKPLLRLKGFPSFPLVERQANEVDWWDMVCNVKKLINEKKEDGKVFWQNLAGYKRQEALRPYLSSEEDRKKGKKFARYQLGDLLLHLEKKHGEDWGKVYDEAWERIDKKVEGLSKHIKLEEERRSEDAQSKAALTDWLRAKKSFVIEGLKEADKDEFCRCELKLQKWYGDLRGKPFAIEAENSILDISGFSKQYNCAFIWQKDGVKKLNLYLIINYFKGGKLRFKKIKPEAFEANRFYTVINKKSGEIVPMEVNFNFDDPNLIILPLAFGKRQGREFIWNDLLSLETGSLKLANGRVIEKTLYNRRTRQDEPALFVALTFERREVLDSSNIKPMNLIGVDRGENIPAVIALTDPEGCPLSRFKDSLGNPTHILRIGESYKEKQRTIQAKKEVEQRRAGGYSRKYASKAKNLADDMVRNTARDLLYYAVTQDAMLIFENLSRGFGRQGKRTFMAERQYTRMEDWLTAKLAYEGLPSKTYLSKTLAQYTSKTCSNCGFTITSADYDRVLEKLKKTATGWMTTINGKELKVEGQITYYNRYKRQNVVKDLSVELDRLSEESVNNDISSWTKGRSGEALSLLKKRFSHRPVQEKFVCLNCGFETHADEQAALNIARSWLFLRSQEYKKYQTNKTTGNTDKRAFVETWQSFYRKKLKEVWKPAV

SEQ ID NO: 43757 - protein, 978 aa, Artificial Sequence
  CasX Variant
QEIKRINKIRRRLVKDSNTKKAGKTGPMKTLLVRVMTPDLRERLENLRKKPENIPQPISNTSRANLNKLLTDYTEMKKAILHVYWEEFQKDPVGLMSRVAQPASKKIDQNKLKPEMDEKGNLTTAGFACSQCGQPLFVYKLEQVSEKGKAYTNYFGRCNVAEHEKLILLAQLKPEKDSDEAVTYSLGKFGQRALDFYSIHVTKESTHPVKPLAQIAGNRYASGPVGKALSDACMGTIASFLSKYQDIIIEHQKVVKGNQKRLESLRELAGKENLEYPSVTLPPQPHTKEGVDAYNEVIARVRMWVNLNLWQKLKLSRDDAKPLLRLKGFPSFPLVERQANEVDWWDMVCNVKKLINEKKEDGKVFWQNLAGYKRQEALRPYLSSEEDRKKGKKFARYQLGDLLLHLEKKHGEDWGKVYDEAWERIDKKVEGLSKHIKLEEERRSEDAQSKAALTDWLRAKASFVEEGLKEADKDEFCRCELKLQKWYGDLRGKPFAIEAENSILDISGFSKQYNCAFIWQKDGVKKLNLYLIINYFKGGKLRFKKIKPEAFEANRFYTVINKKSGEIVPMEVNFNFDDPNLIILPLAFGKRQGREFIWNDLLSLETGSLKLANGRVIEKTLYNRRTRQDEPALFVALTFERREVLDSSNIKPMNLIGVDRGENIPAVIALTDPEGCPLSRFKDSLGNPTHILRIGESYKEKQRTIQAKKEVEQRRAGGYSRKYASKAKNLADDMVRNTARDLLYYAVTQDAMLIFENLSRGFGRQGKRTFMAERQYTRMEDWLTAKLAYEGLPSKTYLSKTLAQYTSKTCSNCGFTITSADYDRVLEKLKKTATGWMTTINGKELKVEGQITYYNRYKRQNVVKDLSVELDRLSEESVNNDISSWTKGRSGEALSLLKKRFSHRPVQEKFVCLNCGFETHADEQAALNIARSWLFLRSQEYKKYQTNKTTGNTDKRAFVETWQSFYRKKLKEVWKPAV

SEQ ID NO: 43758 - protein, 979 aa, Artificial Sequence
  CasX Variant
QEIKRINKIRRRLVKDSNTKKAGKTGPMKTLLVRVMTPDLRERLENLRKKPENIPQPISNTSRANLNKLLTDYTEMKKAILHVYWEEFQKDPVGLMSRVAQPASKKIDQNKLKPEMDEKGNLTTAGFACSQCGQPLFVYKLEQVSEKGKAYTNYFGRCNVAEHEKLILLAQLKPEKDSDEAVTYSLGKFGQRALDFYSIHVTKESTHPVKPLAQIAGNRYASGPVGKALSDACMGTIASFLSKYQDIIIEHQKVVKGNQKRLESLRELAGKENLEYPSVTLPPQPHTKEGVDAYNEVIARVRMWVNLNLWQKLKLSRDDAKPLLRLKGFPSFPLVERQANEVDWWDMVCNVKKLINEKKEDGKVFWQNLAGYKRQEALRPYLSSEEDRKKGKKFARYQLGDLLLHLEKKHGEDWGKVYDEAWERIDKKVEGLSKHIKLEEERRSEDAQSKAALTDWLRAKASFVISEGLKEADKDEFCRCELKLQKWYGDLRGKPFAIEAENSILDISGFSKQYNCAFIWQKDGVKKLNLYLIINYFKGGKLRFKKIKPEAFEANRFYTVINKKSGEIVPMEVNFNFDDPNLIILPLAFGKRQGREFIWNDLLSLETGSLKLANGRVIEKTLYNRRTRQDEPALFVALTFERREVLDSSNIKPMNLIGVDRGENIPAVIALTDPEGCPLSRFKDSLGNPTHILRIGESYKEKQRTIQAKKEVEQRRAGGYSRKYASKAKNLADDMVRNTARDLLYYAVTQDAMLIFENLSRGFGRQGKRTFMAERQYTRMEDWLTAKLAYEGLPSKTYLSKTLAQYTSKTCSNCGFTITSADYDRVLEKLKKTATGWMTTINGKELKVEGQITYYNRYKRQNVVKDLSVELDRLSEESVNNDISSWTKGRSGEALSLLKKRFSHRPVQEKFVCLNCGFETHADEQAALNIARSWLFLRSQEYKKYQTNKTTGNTDKRAFVETWQSFYRKKLKEVWKPAV

SEQ ID NO: 43759 - protein, 979 aa, Artificial Sequence
  CasX Variant
QEIKRINKIRRRLVKDSNTKKAGKTGPMKTLLVRVMTPDLRERLENLRKKPENIPQPISNTSRANLNKLLTDYTEMKKAILHVYWEEFQKDPVGLMSRVAQPASKKIDQNKLKPEMDEKGNLTTAGFACSQCGQPLFVYKLEQVSEKGKAYTNYFGRCNVAEHEKLILLAQLKPEKDSDEAVTYSLGKFGQRALDFYSIHVTKESTHPVKPLAQIAGNRYASGPVGKALSDACMGTIASFLSKYQDIIIEHQKVVKGNQKRLESLRELAGKENLEYPSVTLPPQPHTKEGVDAYNEVIARVRMWVNLNLWQKLKLSRDDAKPLLRLKGFPSFPLVERQANEVDWWDMVCNVKKLINEKKEDGKVFWQNLAGYKRQEALRPYLSSEEDRKKGKKFARYQLGDLLLHLEKKHGEDWGKVYDEAWERIDKKVEGLSKHIKLEEERRSEDAQSKAALTDWLRAKASFVIERGLKEADKDEFCRCELKLQKWYGDLRGKPFAIEAENSILDISGFSKQYNCAFIWQKDGVKKLNLYLIINYFKGGKLRFKKIKPEAFEANRFYTVINKKSGEIVPMEVNFNFDDPNLIILPLAFGKRQGREFIWNDLLSLETGSLKLANGRVIEKTLYNRRTRQDEPALFVALTFERREVLDSSNIKPMNLIGVDRGENIPAVIALTDPEGCPLSRFKDSLGNPTHILRIGESYKEKQRTIQAKKEVEQRRAGGYSRKYASKAKNLADDMVRNTARDLLYYAVTQDAMLIFENLSRGFGRQGKRTFMAERQYTRMEDWLTAKLAYEGLPSKTYLSKTLAQYTSKTCSNCGFTITSADYDRVLEKLKKTATGWMTTINGKELKVEGQITYYNRYKRQNVVKDLSVELDRLSEESVNNDISSWTKGRSGEALSLLKKRFSHRPVQEKFVCLNCGFETHADEQAALNIARSWLFLRSQEYKKYQTNKTTGNTDKRAFVETWQSFYRKKLKEVWKPAV

SEQ ID NO: 43760 - protein, 978 aa, Artificial Sequence
  CasX Variant
QEIKRINKIRRRLVKDSNTKKAGKTGPMKTLLVRVMTPDLRERLENLRKKPENIPQPISNTSRANLNKLLTDYTEMKKAILHVYWEEFQKDPVGLMSRVAQPASKKIDQNKLKPEMDEKGNLTTAGFACSQCGQPLFVYKLEQVSEKGKAYTNYFGRCNVAEHEKLILLAQLKPEKDSDEAVTYSLGKFGQRALDFYSIHVTKESTHPVKPLAQIAGNRYASGPVGKALSDACMGTIASFLSKYQDIIIEHQKVVKGNQKRLESLRELAGKENLEYPSVTLPPQPHTKEGVDAYNEVIARVRMWVNLNLWQKLKLSRDDAKPLLRLKGFPSFPLVERQANEVDWWDMVCNVKKLINEKKEDGKVFWQNLAGYKRQEALRPYLSSEEDRKKGKKFARYQLGDLLLHLEKKHGEDWGKVYDEAWERIDKKVEGLSKHIKLEEERRSEDAQSKAALTDWLRAKASFVIEGKKEADKDEFCRCELKLQKWYGDLRGKPFAIEAENSILDISGFSKQYNCAFIWQKDGVKKLNLYLIINYFKGGKLRFKKIKPEAFEANRFYTVINKKSGEIVPMEVNFNFDDPNLIILPLAFGKRQGREFIWNDLLSLETGSLKLANGRVIEKTLYNRRTRQDEPALFVALTFERREVLDSSNIKPMNLIGVDRGENIPAVIALTDPEGCPLSRFKDSLGNPTHILRIGESYKEKQRTIQAKKEVEQRRAGGYSRKYASKAKNLADDMVRNTARDLLYYAVTQDAMLIFENLSRGFGRQGKRTFMAERQYTRMEDWLTAKLAYEGLPSKTYLSKTLAQYTSKTCSNCGFTITSADYDRVLEKLKKTATGWMTTINGKELKVEGQITYYNRYKRQNVVKDLSVELDRLSEESVNNDISSWTKGRSGEALSLLKKRFSHRPVQEKFVCLNCGFETHADEQAALNIARSWLFLRSQEYKKYQTNKTTGNTDKRAFVETWQSFYRKKLKEVWKPAV

SEQ ID NO: 43761 - protein, 978 aa, Artificial Sequence
  CasX Variant
QEIKRINKIRRRLVKDSNTKKAGKTGPMKTLLVRVMTPDLRERLENLRKKPENIPQPISNTSRANLNKLLTDYTEMKKAILHVYWEEFQKDPVGLMSRVAQPASKKIDQNKLKPEMDEKGNLTTAGFACSQCGQPLFVYKLEQVSEKGKAYTNYFGRCNVAEHEKLILLAQLKPEKDSDEAVTYSLGKFGQRALDFYSIHVTKESTHPVKPLAQIAGNRYASGPVGKALSDACMGTIASFLSKYQDIIIEHQKVVKGNQKRLESLRELAGKENLEYPSVTLPPQPHTKEGVDAYNEVIARVRMWVNLNLWQKLKLSRDDAKPLLRLKGFPSFPLVERQANEVDWWDMVCNVKKLINEKKEDGKVFWQNLAGYKRQEALRPYLSSEEDRKKGKKFARYQLGDLLLHLEKKHGEDWGKVYDEAWERIDKKVEGLSKHIKLEEERRSEDAQSKAALTDWLRAKASFVIEGSKEADKDEFCRCELKLQKWYGDLRGKPFAIEAENSILDISGFSKQYNCAFIWQKDGVKKLNLYLIINYFKGGKLRFKKIKPEAFEANRFYTVINKKSGEIVPMEVNFNFDDPNLIILPLAFGKRQGREFIWNDLLSLETGSLKLANGRVIEKTLYNRRTRQDEPALFVALTFERREVLDSSNIKPMNLIGVDRGENIPAVIALTDPEGCPLSRFKDSLGNPTHILRIGESYKEKQRTIQAKKEVEQRRAGGYSRKYASKAKNLADDMVRNTARDLLYYAVTQDAMLIFENLSRGFGRQGKRTFMAERQYTRMEDWLTAKLAYEGLPSKTYLSKTLAQYTSKTCSNCGFTITSADYDRVLEKLKKTATGWMTTINGKELKVEGQITYYNRYKRQNVVKDLSVELDRLSEESVNNDISSWTKGRSGEALSLLKKRFSHRPVQEKFVCLNCGFETHADEQAALNIARSWLFLRSQEYKKYQTNKTTGNTDKRAFVETWQSFYRKKLKEVWKPAV

SEQ ID NO: 43762 - protein, 979 aa, Artificial Sequence
  CasX Variant
QEIKRINKIRRRLVKDSNTKKAGKTGPMKTLLVRVMTPDLRERLENLRKKPENIPQPISNTSRANLNKLLTDYTEMKKAILHVYWEEFQKDPVGLMSRVAQPASKKIDQNKLKPEMDEKGNLTTAGFACSQCGQPLFVYKLEQVSEKGKAYTNYFGRCNVAEHEKLILLAQLKPEKDSDEAVTYSLGKFGQRALDFYSIHVTKESTHPVKPLAQIAGNRYASGPVGKALSDACMGTIASFLSKYQDIIIEHQKVVKGNQKRLESLRELAGKENLEYPSVTLPPQPHTKEGVDAYNEVIARVRMWVNLNLWQKLKLSRDDAKPLLRLKGFPSFPLVERQANEVDWWDMVCNVKKLINEKKEDGKVFWQNLAGYKRQEALRPYLSSEEDRKKGKKFARYQLGDLLLHLEKKHGEDWGKVYDEAWERIDKKVEGLSKHIKLEEERRSEDAQSKAALTDWLRAKASFVIEGLKEADDKDEFCRCELKLQKWYGDLRGKPFAIEAENSILDISGFSKQYNCAFIWQKDGVKKLNLYLIINYFKGGKLRFKKIKPEAFEANRFYTVINKKSGEIVPMEVNFNFDDPNLIILPLAFGKRQGREFIWNDLLSLETGSLKLANGRVIEKTLYNRRTRQDEPALFVALTFERREVLDSSNIKPMNLIGVDRGENIPAVIALTDPEGCPLSRFKDSLGNPTHILRIGESYKEKQRTIQAKKEVEQRRAGGYSRKYASKAKNLADDMVRNTARDLLYYAVTQDAMLIFENLSRGFGRQGKRTFMAERQYTRMEDWLTAKLAYEGLPSKTYLSKTLAQYTSKTCSNCGFTITSADYDRVLEKLKKTATGWMTTINGKELKVEGQITYYNRYKRQNVVKDLSVELDRLSEESVNNDISSWTKGRSGEALSLLKKRFSHRPVQEKFVCLNCGFETHADEQAALNIARSWLFLRSQEYKKYQTNKTTGNTDKRAFVETWQSFYRKKLKEVWKPAV

SEQ ID NO: 43763 - protein, 979 aa, Artificial Sequence
  CasX Variant
QEIKRINKIRRRLVKDSNTKKAGKTGPMKTLLVRVMTPDLRERLENLRKKPENIPQPISNTSRANLNKLLTDYTEMKKAILHVYWEEFQKDPVGLMSRVAQPASKKIDQNKLKPEMDEKGNLTTAGFACSQCGQPLFVYKLEQVSEKGKAYTNYFGRCNVAEHEKLILLAQLKPEKDSDEAVTYSLGKFGQRALDFYSIHVTKESTHPVKPLAQIAGNRYASGPVGKALSDACMGTIASFLSKYQDIIIEHQKVVKGNQKRLESLRELAGKENLEYPSVTLPPQPHTKEGVDAYNEVIARVRMWVNLNLWQKLKLSRDDAKPLLRLKGFPSFPLVERQANEVDWWDMVCNVKKLINEKKEDGKVFWQNLAGYKRQEALRPYLSSEEDRKKGKKFARYQLGDLLLHLEKKHGEDWGKVYDEAWERIDKKVEGLSKHIKLEEERRSEDAQSKAALTDWLRAKASFVIEGLKEADKDQEFCRCELKLQKWYGDLRGKPFAIEAENSILDISGFSKQYNCAFIWQKDGVKKLNLYLIINYFKGGKLRFKKIKPEAFEANRFYTVINKKSGEIVPMEVNFNFDDPNLIILPLAFGKRQGREFIWNDLLSLETGSLKLANGRVIEKTLYNRRTRQDEPALFVALTFERREVLDSSNIKPMNLIGVDRGENIPAVIALTDPEGCPLSRFKDSLGNPTHILRIGESYKEKQRTIQAKKEVEQRRAGGYSRKYASKAKNLADDMVRNTARDLLYYAVTQDAMLIFENLSRGFGRQGKRTFMAERQYTRMEDWLTAKLAYEGLPSKTYLSKTLAQYTSKTCSNCGFTITSADYDRVLEKLKKTATGWMTTINGKELKVEGQITYYNRYKRQNVVKDLSVELDRLSEESVNNDISSWTKGRSGEALSLLKKRFSHRPVQEKFVCLNCGFETHADEQAALNIARSWLFLRSQEYKKYQTNKTTGNTDKRAFVETWQSFYRKKLKEVWKPAV

SEQ ID NO: 43764 - protein, 978 aa, Artificial Sequence
  CasX Variant
QEIKRINKIRRRLVKDSNTKKAGKTGPMKTLLVRVMTPDLRERLENLRKKPENIPQPISNTSRANLNKLLTDYTEMKKAILHVYWEEFQKDPVGLMSRVAQPASKKIDQNKLKPEMDEKGNLTTAGFACSQCGQPLFVYKLEQVSEKGKAYTNYFGRCNVAEHEKLILLAQLKPEKDSDEAVTYSLGKFGQRALDFYSIHVTKESTHPVKPLAQIAGNRYASGPVGKALSDACMGTIASFLSKYQDIIIEHQKVVKGNQKRLESLRELAGKENLEYPSVTLPPQPHTKEGVDAYNEVIARVRMWVNLNLWQKLKLSRDDAKPLLRLKGFPSFPLVERQANEVDWWDMVCNVKKLINEKKEDGKVFWQNLAGYKRQEALRPYLSSEEDRKKGKKFARYQLGDLLLHLEKKHGEDWGKVYDEAWERIDKKVEGLSKHIKLEEERRSEDAQSKAALTDWLRAKASFVIEGLKEADKDEKCRCELKLQKWYGDLRGKPFAIEAENSILDISGFSKQYNCAFIWQKDGVKKLNLYLIINYFKGGKLRFKKIKPEAFEANRFYTVINKKSGEIVPMEVNFNFDDPNLIILPLAFGKRQGREFIWNDLLSLETGSLKLANGRVIEKTLYNRRTRQDEPALFVALTFERREVLDSSNIKPMNLIGVDRGENIPAVIALTDPEGCPLSRFKDSLGNPTHILRIGESYKEKQRTIQAKKEVEQRRAGGYSRKYASKAKNLADDMVRNTARDLLYYAVTQDAMLIFENLSRGFGRQGKRTFMAERQYTRMEDWLTAKLAYEGLPSKTYLSKTLAQYTSKTCSNCGFTITSADYDRVLEKLKKTATGWMTTINGKELKVEGQITYYNRYKRQNVVKDLSVELDRLSEESVNNDISSWTKGRSGEALSLLKKRFSHRPVQEKFVCLNCGFETHADEQAALNIARSWLFLRSQEYKKYQTNKTTGNTDKRAFVETWQSFYRKKLKEVWKPAV

SEQ ID NO: 43765 - protein, 978 aa, Artificial Sequence
  CasX Variant
QEIKRINKIRRRLVKDSNTKKAGKTGPMKTLLVRVMTPDLRERLENLRKKPENIPQPISNTSRANLNKLLTDYTEMKKAILHVYWEEFQKDPVGLMSRVAQPASKKIDQNKLKPEMDEKGNLTTAGFACSQCGQPLFVYKLEQVSEKGKAYTNYFGRCNVAEHEKLILLAQLKPEKDSDEAVTYSLGKFGQRALDFYSIHVTKESTHPVKPLAQIAGNRYASGPVGKALSDACMGTIASFLSKYQDIIIEHQKVVKGNQKRLESLRELAGKENLEYPSVTLPPQPHTKEGVDAYNEVIARVRMWVNLNLWQKLKLSRDDAKPLLRLKGFPSFPLVERQANEVDWWDMVCNVKKLINEKKEDGKVFWQNLAGYKRQEALRPYLSSEEDRKKGKKFARYQLGDLLLHLEKKHGEDWGKVYDEAWERIDKKVEGLSKHIKLEEERRSEDAQSKAALTDWLRAKASFVIEGLKEADKDEFCRDELKLQKWYGDLRGKPFAIEAENSILDISGFSKQYNCAFIWQKDGVKKLNLYLIINYFKGGKLRFKKIKPEAFEANRFYTVINKKSGEIVPMEVNFNFDDPNLIILPLAFGKRQGREFIWNDLLSLETGSLKLANGRVIEKTLYNRRTRQDEPALFVALTFERREVLDSSNIKPMNLIGVDRGENIPAVIALTDPEGCPLSRFKDSLGNPTHILRIGESYKEKQRTIQAKKEVEQRRAGGYSRKYASKAKNLADDMVRNTARDLLYYAVTQDAMLIFENLSRGFGRQGKRTFMAERQYTRMEDWLTAKLAYEGLPSKTYLSKTLAQYTSKTCSNCGFTITSADYDRVLEKLKKTATGWMTTINGKELKVEGQITYYNRYKRQNVVKDLSVELDRLSEESVNNDISSWTKGRSGEALSLLKKRFSHRPVQEKFVCLNCGFETHADEQAALNIARSWLFLRSQEYKKYQTNKTTGNTDKRAFVETWQSFYRKKLKEVWKPAV

SEQ ID NO: 43766 - protein, 979 aa, Artificial Sequence
  CasX Variant
QEIKRINKIRRRLVKDSNTKKAGKTGPMKTLLVRVMTPDLRERLENLRKKPENIPQPISNTSRANLNKLLTDYTEMKKAILHVYWEEFQKDPVGLMSRVAQPASKKIDQNKLKPEMDEKGNLTTAGFACSQCGQPLFVYKLEQVSEKGKAYTNYFGRCNVAEHEKLILLAQLKPEKDSDEAVTYSLGKFGQRALDFYSIHVTKESTHPVKPLAQIAGNRYASGPVGKALSDACMGTIASFLSKYQDIIIEHQKVVKGNQKRLESLRELAGKENLEYPSVTLPPQPHTKEGVDAYNEVIARVRMWVNLNLWQKLKLSRDDAKPLLRLKGFPSFPLVERQANEVDWWDMVCNVKKLINEKKEDGKVFWQNLAGYKRQEALRPYLSSEEDRKKGKKFARYQLGDLLLHLEKKHGEDWGKVYDEAWERIDKKVEGLSKHIKLEEERRSEDAQSKAALTDWLRAKASFVIEGLKEADKDEFCRCVELKLQKWYGDLRGKPFAIEAENSILDISGFSKQYNCAFIWQKDGVKKLNLYLIINYFKGGKLRFKKIKPEAFEANRFYTVINKKSGEIVPMEVNFNFDDPNLIILPLAFGKRQGREFIWNDLLSLETGSLKLANGRVIEKTLYNRRTRQDEPALFVALTFERREVLDSSNIKPMNLIGVDRGENIPAVIALTDPEGCPLSRFKDSLGNPTHILRIGESYKEKQRTIQAKKEVEQRRAGGYSRKYASKAKNLADDMVRNTARDLLYYAVTQDAMLIFENLSRGFGRQGKRTFMAERQYTRMEDWLTAKLAYEGLPSKTYLSKTLAQYTSKTCSNCGFTITSADYDRVLEKLKKTATGWMTTINGKELKVEGQITYYNRYKRQNVVKDLSVELDRLSEESVNNDISSWTKGRSGEALSLLKKRFSHRPVQEKFVCLNCGFETHADEQAALNIARSWLFLRSQEYKKYQTNKTTGNTDKRAFVETWQSFYRKKLKEVWKPAV

SEQ ID NO: 43767 - protein, 978 aa, Artificial Sequence
  CasX Variant
QEIKRINKIRRRLVKDSNTKKAGKTGPMKTLLVRVMTPDLRERLENLRKKPENIPQPISNTSRANLNKLLTDYTEMKKAILHVYWEEFQKDPVGLMSRVAQPASKKIDQNKLKPEMDEKGNLTTAGFACSQCGQPLFVYKLEQVSEKGKAYTNYFGRCNVAEHEKLILLAQLKPEKDSDEAVTYSLGKFGQRALDFYSIHVTKESTHPVKPLAQIAGNRYASGPVGKALSDACMGTIASFLSKYQDIIIEHQKVVKGNQKRLESLRELAGKENLEYPSVTLPPQPHTKEGVDAYNEVIARVRMWVNLNLWQKLKLSRDDAKPLLRLKGFPSFPLVERQANEVDWWDMVCNVKKLINEKKEDGKVFWQNLAGYKRQEALRPYLSSEEDRKKGKKFARYQLGDLLLHLEKKHGEDWGKVYDEAWERIDKKVEGLSKHIKLEEERRSEDAQSKAALTDWLRAKASFVIEGLKEADKDEFCRCDLKLQKWYGDLRGKPFAIEAENSILDISGFSKQYNCAFIWQKDGVKKLNLYLIINYFKGGKLRFKKIKPEAFEANRFYTVINKKSGEIVPMEVNFNFDDPNLIILPLAFGKRQGREFIWNDLLSLETGSLKLANGRVIEKTLYNRRTRQDEPALFVALTFERREVLDSSNIKPMNLIGVDRGENIPAVIALTDPEGCPLSRFKDSLGNPTHILRIGESYKEKQRTIQAKKEVEQRRAGGYSRKYASKAKNLADDMVRNTARDLLYYAVTQDAMLIFENLSRGFGRQGKRTFMAERQYTRMEDWLTAKLAYEGLPSKTYLSKTLAQYTSKTCSNCGFTITSADYDRVLEKLKKTATGWMTTINGKELKVEGQITYYNRYKRQNVVKDLSVELDRLSEESVNNDISSWTKGRSGEALSLLKKRFSHRPVQEKFVCLNCGFETHADEQAALNIARSWLFLRSQEYKKYQTNKTTGNTDKRAFVETWQSFYRKKLKEVWKPAV

SEQ ID NO: 43768 - protein, 978 aa, Artificial Sequence
  CasX Variant
QEIKRINKIRRRLVKDSNTKKAGKTGPMKTLLVRVMTPDLRERLENLRKKPENIPQPISNTSRANLNKLLTDYTEMKKAILHVYWEEFQKDPVGLMSRVAQPASKKIDQNKLKPEMDEKGNLTTAGFACSQCGQPLFVYKLEQVSEKGKAYTNYFGRCNVAEHEKLILLAQLKPEKDSDEAVTYSLGKFGQRALDFYSIHVTKESTHPVKPLAQIAGNRYASGPVGKALSDACMGTIASFLSKYQDIIIEHQKVVKGNQKRLESLRELAGKENLEYPSVTLPPQPHTKEGVDAYNEVIARVRMWVNLNLWQKLKLSRDDAKPLLRLKGFPSFPLVERQANEVDWWDMVCNVKKLINEKKEDGKVFWQNLAGYKRQEALRPYLSSEEDRKKGKKFARYQLGDLLLHLEKKHGEDWGKVYDEAWERIDKKVEGLSKHIKLEEERRSEDAQSKAALTDWLRAKASFVIEGLKEADKDEFCRCERKLQKWYGDLRGKPFAIEAENSILDISGFSKQYNCAFIWQKDGVKKLNLYLIINYFKGGKLRFKKIKPEAFEANRFYTVINKKSGEIVPMEVNFNFDDPNLIILPLAFGKRQGREFIWNDLLSLETGSLKLANGRVIEKTLYNRRTRQDEPALFVALTFERREVLDSSNIKPMNLIGVDRGENIPAVIALTDPEGCPLSRFKDSLGNPTHILRIGESYKEKQRTIQAKKEVEQRRAGGYSRKYASKAKNLADDMVRNTARDLLYYAVTQDAMLIFENLSRGFGRQGKRTFMAERQYTRMEDWLTAKLAYEGLPSKTYLSKTLAQYTSKTCSNCGFTITSADYDRVLEKLKKTATGWMTTINGKELKVEGQITYYNRYKRQNVVKDLSVELDRLSEESVNNDISSWTKGRSGEALSLLKKRFSHRPVQEKFVCLNCGFETHADEQAALNIARSWLFLRSQEYKKYQTNKTTGNTDKRAFVETWQSFYRKKLKEVWKPAV

SEQ ID NO: 43769 - protein, 978 aa, Artificial Sequence
  CasX Variant
QEIKRINKIRRRLVKDSNTKKAGKTGPMKTLLVRVMTPDLRERLENLRKKPENIPQPISNTSRANLNKLLTDYTEMKKAILHVYWEEFQKDPVGLMSRVAQPASKKIDQNKLKPEMDEKGNLTTAGFACSQCGQPLFVYKLEQVSEKGKAYTNYFGRCNVAEHEKLILLAQLKPEKDSDEAVTYSLGKFGQRALDFYSIHVTKESTHPVKPLAQIAGNRYASGPVGKALSDACMGTIASFLSKYQDIIIEHQKVVKGNQKRLESLRELAGKENLEYPSVTLPPQPHTKEGVDAYNEVIARVRMWVNLNLWQKLKLSRDDAKPLLRLKGFPSFPLVERQANEVDWWDMVCNVKKLINEKKEDGKVFWQNLAGYKRQEALRPYLSSEEDRKKGKKFARYQLGDLLLHLEKKHGEDWGKVYDEAWERIDKKVEGLSKHIKLEEERRSEDAQSKAALTDWLRAKASFVIEGLKEADKDEFCRCELKHQKWYGDLRGKPFAIEAENSILDISGFSKQYNCAFIWQKDGVKKLNLYLIINYFKGGKLRFKKIKPEAFEANRFYTVINKKSGEIVPMEVNFNFDDPNLIILPLAFGKRQGREFIWNDLLSLETGSLKLANGRVIEKTLYNRRTRQDEPALFVALTFERREVLDSSNIKPMNLIGVDRGENIPAVIALTDPEGCPLSRFKDSLGNPTHILRIGESYKEKQRTIQAKKEVEQRRAGGYSRKYASKAKNLADDMVRNTARDLLYYAVTQDAMLIFENLSRGFGRQGKRTFMAERQYTRMEDWLTAKLAYEGLPSKTYLSKTLAQYTSKTCSNCGFTITSADYDRVLEKLKKTATGWMTTINGKELKVEGQITYYNRYKRQNVVKDLSVELDRLSEESVNNDISSWTKGRSGEALSLLKKRFSHRPVQEKFVCLNCGFETHADEQAALNIARSWLFLRSQEYKKYQTNKTTGNTDKRAFVETWQSFYRKKLKEVWKPAV

SEQ ID NO: 43770 - protein, 978 aa, Artificial Sequence
  CasX Variant
QEIKRINKIRRRLVKDSNTKKAGKTGPMKTLLVRVMTPDLRERLENLRKKPENIPQPISNTSRANLNKLLTDYTEMKKAILHVYWEEFQKDPVGLMSRVAQPASKKIDQNKLKPEMDEKGNLTTAGFACSQCGQPLFVYKLEQVSEKGKAYTNYFGRCNVAEHEKLILLAQLKPEKDSDEAVTYSLGKFGQRALDFYSIHVTKESTHPVKPLAQIAGNRYASGPVGKALSDACMGTIASFLSKYQDIIIEHQKVVKGNQKRLESLRELAGKENLEYPSVTLPPQPHTKEGVDAYNEVIARVRMWVNLNLWQKLKLSRDDAKPLLRLKGFPSFPLVERQANEVDWWDMVCNVKKLINEKKEDGKVFWQNLAGYKRQEALRPYLSSEEDRKKGKKFARYQLGDLLLHLEKKHGEDWGKVYDEAWERIDKKVEGLSKHIKLEEERRSEDAQSKAALTDWLRAKASFVIEGLKEADKDEFCRCELKLQPWYGDLRGKPFAIEAENSILDISGFSKQYNCAFIWQKDGVKKLNLYLIINYFKGGKLRFKKIKPEAFEANRFYTVINKKSGEIVPMEVNFNFDDPNLIILPLAFGKRQGREFIWNDLLSLETGSLKLANGRVIEKTLYNRRTRQDEPALFVALTFERREVLDSSNIKPMNLIGVDRGENIPAVIALTDPEGCPLSRFKDSLGNPTHILRIGESYKEKQRTIQAKKEVEQRRAGGYSRKYASKAKNLADDMVRNTARDLLYYAVTQDAMLIFENLSRGFGRQGKRTFMAERQYTRMEDWLTAKLAYEGLPSKTYLSKTLAQYTSKTCSNCGFTITSADYDRVLEKLKKTATGWMTTINGKELKVEGQITYYNRYKRQNVVKDLSVELDRLSEESVNNDISSWTKGRSGEALSLLKKRFSHRPVQEKFVCLNCGFETHADEQAALNIARSWLFLRSQEYKKYQTNKTTGNTDKRAFVETWQSFYRKKLKEVWKPAV

SEQ ID NO: 43771 - protein, 978 aa, Artificial Sequence; identical to SEQ ID NO: 43683
  CasX Variant

SEQ ID NO: 43772 - protein, 978 aa, Artificial Sequence
  CasX Variant
QEIKRINKIRRRLVKDSNTKKAGKTGPMKTLLVRVMTPDLRERLENLRKKPENIPQPISNTSRANLNKLLTDYTEMKKAILHVYWEEFQKDPVGLMSRVAQPASKKIDQNKLKPEMDEKGNLTTAGFACSQCGQPLFVYKLEQVSEKGKAYTNYFGRCNVAEHEKLILLAQLKPEKDSDEAVTYSLGKFGQRALDFYSIHVTKESTHPVKPLAQIAGNRYASGPVGKALSDACMGTIASFLSKYQDIIIEHQKVVKGNQKRLESLRELAGKENLEYPSVTLPPQPHTKEGVDAYNEVIARVRMWVNLNLWQKLKLSRDDAKPLLRLKGFPSFPLVERQANEVDWWDMVCNVKKLINEKKEDGKVFWQNLAGYKRQEALRPYLSSEEDRKKGKKFARYQLGDLLLHLEKKHGEDWGKVYDEAWERIDKKVEGLSKHIKLEEERRSEDAQSKAALTDWLRAKASFVIEGLKEADKDEFCRCELKLQKWYGDLRGKPFAIEAENSILDISGFSKQYNCAFIWQKDGVKKLNLYLIINYFKGGKLRFKKIKPEAFEANRFYTVINKKSGEIVPMEVNFNFDDPNLIILPLAFGKRFGREFIWNDLLSLETGSLKLANGRVIEKTLYNRRTRQDEPALFVALTFERREVLDSSNIKPMNLIGVDRGENIPAVIALTDPEGCPLSRFKDSLGNPTHILRIGESYKEKQRTIQAKKEVEQRRAGGYSRKYASKAKNLADDMVRNTARDLLYYAVTQDAMLIFENLSRGFGRQGKRTFMAERQYTRMEDWLTAKLAYEGLPSKTYLSKTLAQYTSKTCSNCGFTITSADYDRVLEKLKKTATGWMTTINGKELKVEGQITYYNRYKRQNVVKDLSVELDRLSEESVNNDISSWTKGRSGEALSLLKKRFSHRPVQEKFVCLNCGFETHADEQAALNIARSWLFLRSQEYKKYQTNKTTGNTDKRAFVETWQSFYRKKLKEVWKPAV

SEQ ID NO: 43773 - protein, 978 aa, Artificial Sequence
  CasX Variant
QEIKRINKIRRRLVKDSNTKKAGKTGPMKTLLVRVMTPDLRERLENLRKKPENIPQPISNTSRANLNKLLTDYTEMKKAILHVYWEEFQKDPVGLMSRVAQPASKKIDQNKLKPEMDEKGNLTTAGFACSQCGQPLFVYKLEQVSEKGKAYTNYFGRCNVAEHEKLILLAQLKPEKDSDEAVTYSLGKFGQRALDFYSIHVTKESTHPVKPLAQIAGNRYASGPVGKALSDACMGTIASFLSKYQDIIIEHQKVVKGNQKRLESLRELAGKENLEYPSVTLPPQPHTKEGVDAYNEVIARVRMWVNLNLWQKLKLSRDDAKPLLRLKGFPSFPLVERQANEVDWWDMVCNVKKLINEKKEDGKVFWQNLAGYKRQEALRPYLSSEEDRKKGKKFARYQLGDLLLHLEKKHGEDWGKVYDEAWERIDKKVEGLSKHIKLEEERRSEDAQSKAALTDWLRAKASFVIEGLKEADKDEFCRCELKLQKWYGDLRGKPFAIEAENSILDISGFSKQYNCAFIWQKDGVKKLNLYLIINYFKGGKLRFKKIKPEAFEANRFYTVINKKSGEIVPMEVNFNFDDPNLIILPLAFGKRVGREFIWNDLLSLETGSLKLANGRVIEKTLYNRRTRQDEPALFVALTFERREVLDSSNIKPMNLIGVDRGENIPAVIALTDPEGCPLSRFKDSLGNPTHILRIGESYKEKQRTIQAKKEVEQRRAGGYSRKYASKAKNLADDMVRNTARDLLYYAVTQDAMLIFENLSRGFGRQGKRTFMAERQYTRMEDWLTAKLAYEGLPSKTYLSKTLAQYTSKTCSNCGFTITSADYDRVLEKLKKTATGWMTTINGKELKVEGQITYYNRYKRQNVVKDLSVELDRLSEESVNNDISSWTKGRSGEALSLLKKRFSHRPVQEKFVCLNCGFETHADEQAALNIARSWLFLRSQEYKKYQTNKTTGNTDKRAFVETWQSFYRKKLKEVWKPAV

SEQ ID NO: 43774 - protein, 979 aa, Artificial Sequence
  CasX Variant
QEIKRINKIRRRLVKDSNTKKAGKTGPMKTLLVRVMTPDLRERLENLRKKPENIPQPISNTSRANLNKLLTDYTEMKKAILHVYWEEFQKDPVGLMSRVAQPASKKIDQNKLKPEMDEKGNLTTAGFACSQCGQPLFVYKLEQVSEKGKAYTNYFGRCNVAEHEKLILLAQLKPEKDSDEAVTYSLGKFGQRALDFYSIHVTKESTHPVKPLAQIAGNRYASGPVGKALSDACMGTIASFLSKYQDIIIEHQKVVKGNQKRLESLRELAGKENLEYPSVTLPPQPHTKEGVDAYNEVIARVRMWVNLNLWQKLKLSRDDAKPLLRLKGFPSFPLVERQANEVDWWDMVCNVKKLINEKKEDGKVFWQNLAGYKRQEALRPYLSSEEDRKKGKKFARYQLGDLLLHLEKKHGEDWGKVYDEAWERIDKKVEGLSKHIKLEEERRSEDAQSKAALTDWLRAKASFVIEGLKEADKDEFCRCELKLQKWYGDLRGKPFAIEAENSILDISGFSKQYNCAFIWQKDGVKKLNLYLIINYFKGGKLRFKKIKPEAFEANRFYTVINKKSGEIVPMEVNFNFDDPNLIILPLAFGKRQGREFIWNDLLSLETGSLKLANGRVIEKTLYNRRTRQDEPALFVALTFERREVLDSSNIIKPMNLIGVDRGENIPAVIALTDPEGCPLSRFKDSLGNPTHILRIGESYKEKQRTIQAKKEVEQRRAGGYSRKYASKAKNLADDMVRNTARDLLYYAVTQDAMLIFENLSRGFGRQGKRTFMAERQYTRMEDWLTAKLAYEGLPSKTYLSKTLAQYTSKTCSNCGFTITSADYDRVLEKLKKTATGWMTTINGKELKVEGQITYYNRYKRQNVVKDLSVELDRLSEESVNNDISSWTKGRSGEALSLLKKRFSHRPVQEKFVCLNCGFETHADEQAALNIARSWLFLRSQEYKKYQTNKTTGNTDKRAFVETWQSFYRKKLKEVWKPAV

SEQ ID NO: 43775 - protein, 979 aa, Artificial Sequence
  CasX Variant
QEIKRINKIRRRLVKDSNTKKAGKTGPMKTLLVRVMTPDLRERLENLRKKPENIPQPISNTSRANLNKLLTDYTEMKKAILHVYWEEFQKDPVGLMSRVAQPASKKIDQNKLKPEMDEKGNLTTAGFACSQCGQPLFVYKLEQVSEKGKAYTNYFGRCNVAEHEKLILLAQLKPEKDSDEAVTYSLGKFGQRALDFYSIHVTKESTHPVKPLAQIAGNRYASGPVGKALSDACMGTIASFLSKYQDIIIEHQKVVKGNQKRLESLRELAGKENLEYPSVTLPPQPHTKEGVDAYNEVIARVRMWVNLNLWQKLKLSRDDAKPLLRLKGFPSFPLVERQANEVDWWDMVCNVKKLINEKKEDGKVFWQNLAGYKRQEALRPYLSSEEDRKKGKKFARYQLGDLLLHLEKKHGEDWGKVYDEAWERIDKKVEGLSKHIKLEEERRSEDAQSKAALTDWLRAKASFVIEGLKEADKDEFCRCELKLQKWYGDLRGKPFAIEAENSILDISGFSKQYNCAFIWQKDGVKKLNLYLIINYFKGGKLRFKKIKPEAFEANRFYTVINKKSGEIVPMEVNFNFDDPNLIILPLAFGKRQGREFIWNDLLSLETGSLKLANGRVIEKTLYNRRTRQDEPALFVALTFERREVLDSSNIKTPMNLIGVDRGENIPAVIALTDPEGCPLSRFKDSLGNPTHILRIGESYKEKQRTIQAKKEVEQRRAGGYSRKYASKAKNLADDMVRNTARDLLYYAVTQDAMLIFENLSRGFGRQGKRTFMAERQYTRMEDWLTAKLAYEGLPSKTYLSKTLAQYTSKTCSNCGFTITSADYDRVLEKLKKTATGWMTTINGKELKVEGQITYYNRYKRQNVVKDLSVELDRLSEESVNNDISSWTKGRSGEALSLLKKRFSHRPVQEKFVCLNCGFETHADEQAALNIARSWLFLRSQEYKKYQTNKTTGNTDKRAFVETWQSFYRKKLKEVWKPAV

SEQ ID NO: 43776 - protein, 979 aa, Artificial Sequence
  CasX Variant
QEIKRINKIRRRLVKDSNTKKAGKTGPMKTLLVRVMTPDLRERLENLRKKPENIPQPISNTSRANLNKLLTDYTEMKKAILHVYWEEFQKDPVGLMSRVAQPASKKIDQNKLKPEMDEKGNLTTAGFACSQCGQPLFVYKLEQVSEKGKAYTNYFGRCNVAEHEKLILLAQLKPEKDSDEAVTYSLGKFGQRALDFYSIHVTKESTHPVKPLAQIAGNRYASGPVGKALSDACMGTIASFLSKYQDIIIEHQKVVKGNQKRLESLRELAGKENLEYPSVTLPPQPHTKEGVDAYNEVIARVRMWVNLNLWQKLKLSRDDAKPLLRLKGFPSFPLVERQANEVDWWDMVCNVKKLINEKKEDGKVFWQNLAGYKRQEALRPYLSSEEDRKKGKKFARYQLGDLLLHLEKKHGEDWGKVYDEAWERIDKKVEGLSKHIKLEEERRSEDAQSKAALTDWLRAKASFVIEGLKEADKDEFCRCELKLQKWYGDLRGKPFAIEAENSILDISGFSKQYNCAFIWQKDGVKKLNLYLIINYFKGGKLRFKKIKPEAFEANRFYTVINKKSGEIVPMEVNFNFDDPNLIILPLAFGKRQGREFIWNDLLSLETGSLKLANGRVIEKTLYNRRTRQDEPALFVALTFERREVLDSSNIKNPMNLIGVDRGENIPAVIALTDPEGCPLSRFKDSLGNPTHILRIGESYKEKQRTIQAKKEVEQRRAGGYSRKYASKAKNLADDMVRNTARDLLYYAVTQDAMLIFENLSRGFGRQGKRTFMAERQYTRMEDWLTAKLAYEGLPSKTYLSKTLAQYTSKTCSNCGFTITSADYDRVLEKLKKTATGWMTTINGKELKVEGQITYYNRYKRQNVVKDLSVELDRLSEESVNNDISSWTKGRSGEALSLLKKRFSHRPVQEKFVCLNCGFETHADEQAALNIARSWLFLRSQEYKKYQTNKTTGNTDKRAFVETWQSFYRKKLKEVWKPAV

SEQ ID NO: 43777 - protein, 979 aa, Artificial Sequence
  CasX Variant
QEIKRINKIRRRLVKDSNTKKAGKTGPMKTLLVRVMTPDLRERLENLRKKPENIPQPISNTSRANLNKLLTDYTEMKKAILHVYWEEFQKDPVGLMSRVAQPASKKIDQNKLKPEMDEKGNLTTAGFACSQCGQPLFVYKLEQVSEKGKAYTNYFGRCNVAEHEKLILLAQLKPEKDSDEAVTYSLGKFGQRALDFYSIHVTKESTHPVKPLAQIAGNRYASGPVGKALSDACMGTIASFLSKYQDIIIEHQKVVKGNQKRLESLRELAGKENLEYPSVTLPPQPHTKEGVDAYNEVIARVRMWVNLNLWQKLKLSRDDAKPLLRLKGFPSFPLVERQANEVDWWDMVCNVKKLINEKKEDGKVFWQNLAGYKRQEALRPYLSSEEDRKKGKKFARYQLGDLLLHLEKKHGEDWGKVYDEAWERIDKKVEGLSKHIKLEEERRSEDAQSKAALTDWLRAKASFVIEGLKEADKDEFCRCELKLQKWYGDLRGKPFAIEAENSILDISGFSKQYNCAFIWQKDGVKKLNLYLIINYFKGGKLRFKKIKPEAFEANRFYTVINKKSGEIVPMEVNFNFDDPNLIILPLAFGKRQGREFIWNDLLSLETGSLKLANGRVIEKTLYNRRTRQDEPALFVALTFERREVLDSSNIKPRMNLIGVDRGENIPAVIALTDPEGCPLSRFKDSLGNPTHILRIGESYKEKQRTIQAKKEVEQRRAGGYSRKYASKAKNLADDMVRNTARDLLYYAVTQDAMLIFENLSRGFGRQGKRTFMAERQYTRMEDWLTAKLAYEGLPSKTYLSKTLAQYTSKTCSNCGFTITSADYDRVLEKLKKTATGWMTTINGKELKVEGQITYYNRYKRQNVVKDLSVELDRLSEESVNNDISSWTKGRSGEALSLLKKRFSHRPVQEKFVCLNCGFETHADEQAALNIARSWLFLRSQEYKKYQTNKTTGNTDKRAFVETWQSFYRKKLKEVWKPAV

SEQ ID NO: 43778 - protein, 979 aa, Artificial Sequence
  CasX Variant
QEIKRINKIRRRLVKDSNTKKAGKTGPMKTLLVRVMTPDLRERLENLRKKPENIPQPISNTSRANLNKLLTDYTEMKKAILHVYWEEFQKDPVGLMSRVAQPASKKIDQNKLKPEMDEKGNLTTAGFACSQCGQPLFVYKLEQVSEKGKAYTNYFGRCNVAEHEKLILLAQLKPEKDSDEAVTYSLGKFGQRALDFYSIHVTKESTHPVKPLAQIAGNRYASGPVGKALSDACMGTIASFLSKYQDIIIEHQKVVKGNQKRLESLRELAGKENLEYPSVTLPPQPHTKEGVDAYNEVIARVRMWVNLNLWQKLKLSRDDAKPLLRLKGFPSFPLVERQANEVDWWDMVCNVKKLINEKKEDGKVFWQNLAGYKRQEALRPYLSSEEDRKKGKKFARYQLGDLLLHLEKKHGEDWGKVYDEAWERIDKKVEGLSKHIKLEEERRSEDAQSKAALTDWLRAKASFVIEGLKEADKDEFCRCELKLQKWYGDLRGKPFAIEAENSILDISGFSKQYNCAFIWQKDGVKKLNLYLIINYFKGGKLRFKKIKPEAFEANRFYTVINKKSGEIVPMEVNFNFDDPNLIILPLAFGKRQGREFIWNDLLSLETGSLKLANGRVIEKTLYNRRTRQDEPALFVALTFERREVLDSSNIKPMSNLIGVDRGENIPAVIALTDPEGCPLSRFKDSLGNPTHILRIGESYKEKQRTIQAKKEVEQRRAGGYSRKYASKAKNLADDMVRNTARDLLYYAVTQDAMLIFENLSRGFGRQGKRTFMAERQYTRMEDWLTAKLAYEGLPSKTYLSKTLAQYTSKTCSNCGFTITSADYDRVLEKLKKTATGWMTTINGKELKVEGQITYYNRYKRQNVVKDLSVELDRLSEESVNNDISSWTKGRSGEALSLLKKRFSHRPVQEKFVCLNCGFETHADEQAALNIARSWLFLRSQEYKKYQTNKTTGNTDKRAFVETWQSFYRKKLKEVWKPAV

SEQ ID NO: 43779 - protein, 978 aa, Artificial Sequence
  CasX Variant
QEIKRINKIRRRLVKDSNTKKAGKTGPMKTLLVRVMTPDLRERLENLRKKPENIPQPISNTSRANLNKLLTDYTEMKKAILHVYWEEFQKDPVGLMSRVAQPASKKIDQNKLKPEMDEKGNLTTAGFACSQCGQPLFVYKLEQVSEKGKAYTNYFGRCNVAEHEKLILLAQLKPEKDSDEAVTYSLGKFGQRALDFYSIHVTKESTHPVKPLAQIAGNRYASGPVGKALSDACMGTIASFLSKYQDIIIEHQKVVKGNQKRLESLRELAGKENLEYPSVTLPPQPHTKEGVDAYNEVIARVRMWVNLNLWQKLKLSRDDAKPLLRLKGFPSFPLVERQANEVDWWDMVCNVKKLINEKKEDGKVFWQNLAGYKRQEALRPYLSSEEDRKKGKKFARYQLGDLLLHLEKKHGEDWGKVYDEAWERIDKKVEGLSKHIKLEEERRSEDAQSKAALTDWLRAKASFVIEGLKEADKDEFCRCELKLQKWYGDLRGKPFAIEAENSILDISGFSKQYNCAFIWQKDGVKKLNLYLIINYFKGGKLRFKKIKPEAFEANRFYTVINKKSGEIVPMEVNFNFDDPNLIILPLAFGKRQGREFIWNDLLSLETGSLKLANGRVIEKTLYNRRTRQDEPALFVALTFERREVLDSSNIKPMNLIGVDRGENIPAVIALTDPEGCPLSRFKDSLGNPTHILRIWESYKEKQRTIQAKKEVEQRRAGGYSRKYASKAKNLADDMVRNTARDLLYYAVTQDAMLIFENLSRGFGRQGKRTFMAERQYTRMEDWLTAKLAYEGLPSKTYLSKTLAQYTSKTCSNCGFTITSADYDRVLEKLKKTATGWMTTINGKELKVEGQITYYNRYKRQNVVKDLSVELDRLSEESVNNDISSWTKGRSGEALSLLKKRFSHRPVQEKFVCLNCGFETHADEQAALNIARSWLFLRSQEYKKYQTNKTTGNTDKRAFVETWQSFYRKKLKEVWKPAV

SEQ ID NO: 43780 - protein, 978 aa, Artificial Sequence
  CasX Variant
QEIKRINKIRRRLVKDSNTKKAGKTGPMKTLLVRVMTPDLRERLENLRKKPENIPQPISNTSRANLNKLLTDYTEMKKAILHVYWEEFQKDPVGLMSRVAQPASKKIDQNKLKPEMDEKGNLTTAGFACSQCGQPLFVYKLEQVSEKGKAYTNYFGRCNVAEHEKLILLAQLKPEKDSDEAVTYSLGKFGQRALDFYSIHVTKESTHPVKPLAQIAGNRYASGPVGKALSDACMGTIASFLSKYQDIIIEHQKVVKGNQKRLESLRELAGKENLEYPSVTLPPQPHTKEGVDAYNEVIARVRMWVNLNLWQKLKLSRDDAKPLLRLKGFPSFPLVERQANEVDWWDMVCNVKKLINEKKEDGKVFWQNLAGYKRQEALRPYLSSEEDRKKGKKFARYQLGDLLLHLEKKHGEDWGKVYDEAWERIDKKVEGLSKHIKLEEERRSEDAQSKAALTDWLRAKASFVIEGLKEADKDEFCRCELKLQKWYGDLRGKPFAIEAENSILDISGFSKQYNCAFIWQKDGVKKLNLYLIINYFKGGKLRFKKIKPEAFEANRFYTVINKKSGEIVPMEVNFNFDDPNLIILPLAFGKRQGREFIWNDLLSLETGSLKLANGRVIEKTLYNRRTRQDEPALFVALTFERREVLDSSNIKPMNLIGVDRGENIPAVIALTDPEGCPLSRFKDSLGNPTHILRIRESYKEKQRTIQAKKEVEQRRAGGYSRKYASKAKNLADDMVRNTARDLLYYAVTQDAMLIFENLSRGFGRQGKRTFMAERQYTRMEDWLTAKLAYEGLPSKTYLSKTLAQYTSKTCSNCGFTITSADYDRVLEKLKKTATGWMTTINGKELKVEGQITYYNRYKRQNVVKDLSVELDRLSEESVNNDISSWTKGRSGEALSLLKKRFSHRPVQEKFVCLNCGFETHADEQAALNIARSWLFLRSQEYKKYQTNKTTGNTDKRAFVETWQSFYRKKLKEVWKPAV

SEQ ID NO: 43781 - protein, 978 aa, Artificial Sequence
  CasX Variant
QEIKRINKIRRRLVKDSNTKKAGKTGPMKTLLVRVMTPDLRERLENLRKKPENIPQPISNTSRANLNKLLTDYTEMKKAILHVYWEEFQKDPVGLMSRVAQPASKKIDQNKLKPEMDEKGNLTTAGFACSQCGQPLFVYKLEQVSEKGKAYTNYFGRCNVAEHEKLILLAQLKPEKDSDEAVTYSLGKFGQRALDFYSIHVTKESTHPVKPLAQIAGNRYASGPVGKALSDACMGTIASFLSKYQDIIIEHQKVVKGNQKRLESLRELAGKENLEYPSVTLPPQPHTKEGVDAYNEVIARVRMWVNLNLWQKLKLSRDDAKPLLRLKGFPSFPLVERQANEVDWWDMVCNVKKLINEKKEDGKVFWQNLAGYKRQEALRPYLSSEEDRKKGKKFARYQLGDLLLHLEKKHGEDWGKVYDEAWERIDKKVEGLSKHIKLEEERRSEDAQSKAALTDWLRAKASFVIEGLKEADKDEFCRCELKLQKWYGDLRGKPFAIEAENSILDISGFSKQYNCAFIWQKDGVKKLNLYLIINYFKGGKLRFKKIKPEAFEANRFYTVINKKSGEIVPMEVNFNFDDPNLIILPLAFGKRQGREFIWNDLLSLETGSLKLANGRVIEKTLYNRRTRQDEPALFVALTFERREVLDSSNIKPMNLIGVDRGENIPAVIALTDPEGCPLSRFKDSLGNPTHILRIGESYKEKQRTIQASKEVEQRRAGGYSRKYASKAKNLADDMVRNTARDLLYYAVTQDAMLIFENLSRGFGRQGKRTFMAERQYTRMEDWLTAKLAYEGLPSKTYLSKTLAQYTSKTCSNCGFTITSADYDRVLEKLKKTATGWMTTINGKELKVEGQITYYNRYKRQNVVKDLSVELDRLSEESVNNDISSWTKGRSGEALSLLKKRFSHRPVQEKFVCLNCGFETHADEQAALNIARSWLFLRSQEYKKYQTNKTTGNTDKRAFVETWQSFYRKKLKEVWKPAV

SEQ ID NO: 43782 - protein, 978 aa, Artificial Sequence
  CasX Variant
QEIKRINKIRRRLVKDSNTKKAGKTGPMKTLLVRVMTPDLRERLENLRKKPENIPQPISNTSRANLNKLLTDYTEMKKAILHVYWEEFQKDPVGLMSRVAQPASKKIDQNKLKPEMDEKGNLTTAGFACSQCGQPLFVYKLEQVSEKGKAYTNYFGRCNVAEHEKLILLAQLKPEKDSDEAVTYSLGKFGQRALDFYSIHVTKESTHPVKPLAQIAGNRYASGPVGKALSDACMGTIASFLSKYQDIIIEHQKVVKGNQKRLESLRELAGKENLEYPSVTLPPQPHTKEGVDAYNEVIARVRMWVNLNLWQKLKLSRDDAKPLLRLKGFPSFPLVERQANEVDWWDMVCNVKKLINEKKEDGKVFWQNLAGYKRQEALRPYLSSEEDRKKGKKFARYQLGDLLLHLEKKHGEDWGKVYDEAWERIDKKVEGLSKHIKLEEERRSEDAQSKAALTDWLRAKASFVIEGLKEADKDEFCRCELKLQKWYGDLRGKPFAIEAENSILDISGFSKQYNCAFIWQKDGVKKLNLYLIINYFKGGKLRFKKIKPEAFEANRFYTVINKKSGEIVPMEVNFNFDDPNLIILPLAFGKRQGREFIWNDLLSLETGSLKLANGRVIEKTLYNRRTRQDEPALFVALTFERREVLDSSNIKPMNLIGVDRGENIPAVIALTDPEGCPLSRFKDSLGNPTHILRIGESYKEKQRTIQAKKEVEQRRAGGYSRKYASKAKNLADDMVHNTARDLLYYAVTQDAMLIFENLSRGFGRQGKRTFMAERQYTRMEDWLTAKLAYEGLPSKTYLSKTLAQYTSKTCSNCGFTITSADYDRVLEKLKKTATGWMTTINGKELKVEGQITYYNRYKRQNVVKDLSVELDRLSEESVNNDISSWTKGRSGEALSLLKKRFSHRPVQEKFVCLNCGFETHADEQAALNIARSWLFLRSQEYKKYQTNKTTGNTDKRAFVETWQSFYRKKLKEVWKPAV

SEQ ID NO: 43783 - protein, 978 aa, Artificial Sequence
  CasX Variant
QEIKRINKIRRRLVKDSNTKKAGKTGPMKTLLVRVMTPDLRERLENLRKKPENIPQPISNTSRANLNKLLTDYTEMKKAILHVYWEEFQKDPVGLMSRVAQPASKKIDQNKLKPEMDEKGNLTTAGFACSQCGQPLFVYKLEQVSEKGKAYTNYFGRCNVAEHEKLILLAQLKPEKDSDEAVTYSLGKFGQRALDFYSIHVTKESTHPVKPLAQIAGNRYASGPVGKALSDACMGTIASFLSKYQDIIIEHQKVVKGNQKRLESLRELAGKENLEYPSVTLPPQPHTKEGVDAYNEVIARVRMWVNLNLWQKLKLSRDDAKPLLRLKGFPSFPLVERQANEVDWWDMVCNVKKLINEKKEDGKVFWQNLAGYKRQEALRPYLSSEEDRKKGKKFARYQLGDLLLHLEKKHGEDWGKVYDEAWERIDKKVEGLSKHIKLEEERRSEDAQSKAALTDWLRAKASFVIEGLKEADKDEFCRCELKLQKWYGDLRGKPFAIEAENSILDISGFSKQYNCAFIWQKDGVKKLNLYLIINYFKGGKLRFKKIKPEAFEANRFYTVINKKSGEIVPMEVNFNFDDPNLIILPLAFGKRQGREFIWNDLLSLETGSLKLANGRVIEKTLYNRRTRQDEPALFVALTFERREVLDSSNIKPMNLIGVDRGENIPAVIALTDPEGCPLSRFKDSLGNPTHILRIGESYKEKQRTIQAKKEVEQRRAGGYSRKYASKAKNLADDMVRNTARDLLYYAVTQDAMLIFENLSRGFGRQGKRTFSAERQYTRMEDWLTAKLAYEGLPSKTYLSKTLAQYTSKTCSNCGFTITSADYDRVLEKLKKTATGWMTTINGKELKVEGQITYYNRYKRQNVVKDLSVELDRLSEESVNNDISSWTKGRSGEALSLLKKRFSHRPVQEKFVCLNCGFETHADEQAALNIARSWLFLRSQEYKKYQTNKTTGNTDKRAFVETWQSFYRKKLKEVWKPAV

SEQ ID NO: 43784 - protein, 978 aa, Artificial Sequence
  CasX Variant
QEIKRINKIRRRLVKDSNTKKAGKTGPMKTLLVRVMTPDLRERLENLRKKPENIPQPISNTSRANLNKLLTDYTEMKKAILHVYWEEFQKDPVGLMSRVAQPASKKIDQNKLKPEMDEKGNLTTAGFACSQCGQPLFVYKLEQVSEKGKAYTNYFGRCNVAEHEKLILLAQLKPEKDSDEAVTYSLGKFGQRALDFYSIHVTKESTHPVKPLAQIAGNRYASGPVGKALSDACMGTIASFLSKYQDIIIEHQKVVKGNQKRLESLRELAGKENLEYPSVTLPPQPHTKEGVDAYNEVIARVRMWVNLNLWQKLKLSRDDAKPLLRLKGFPSFPLVERQANEVDWWDMVCNVKKLINEKKEDGKVFWQNLAGYKRQEALRPYLSSEEDRKKGKKFARYQLGDLLLHLEKKHGEDWGKVYDEAWERIDKKVEGLSKHIKLEEERRSEDAQSKAALTDWLRAKASFVIEGLKEADKDEFCRCELKLQKWYGDLRGKPFAIEAENSILDISGFSKQYNCAFIWQKDGVKKLNLYLIINYFKGGKLRFKKIKPEAFEANRFYTVINKKSGEIVPMEVNFNFDDPNLIILPLAFGKRQGREFIWNDLLSLETGSLKLANGRVIEKTLYNRRTRQDEPALFVALTFERREVLDSSNIKPMNLIGVDRGENIPAVIALTDPEGCPLSRFKDSLGNPTHILRIGESYKEKQRTIQAKKEVEQRRAGGYSRKYASKAKNLADDMVRNTARDLLYYAVTQDAMLIFENLSRGFGRQGKRTFAAERQYTRMEDWLTAKLAYEGLPSKTYLSKTLAQYTSKTCSNCGFTITSADYDRVLEKLKKTATGWMTTINGKELKVEGQITYYNRYKRQNVVKDLSVELDRLSEESVNNDISSWTKGRSGEALSLLKKRFSHRPVQEKFVCLNCGFETHADEQAALNIARSWLFLRSQEYKKYQTNKTTGNTDKRAFVETWQSFYRKKLKEVWKPAV

SEQ ID NO: 43785 - protein, 978 aa, Artificial Sequence
  CasX Variant
QEIKRINKIRRRLVKDSNTKKAGKTGPMKTLLVRVMTPDLRERLENLRKKPENIPQPISNTSRANLNKLLTDYTEMKKAILHVYWEEFQKDPVGLMSRVAQPASKKIDQNKLKPEMDEKGNLTTAGFACSQCGQPLFVYKLEQVSEKGKAYTNYFGRCNVAEHEKLILLAQLKPEKDSDEAVTYSLGKFGQRALDFYSIHVTKESTHPVKPLAQIAGNRYASGPVGKALSDACMGTIASFLSKYQDIIIEHQKVVKGNQKRLESLRELAGKENLEYPSVTLPPQPHTKEGVDAYNEVIARVRMWVNLNLWQKLKLSRDDAKPLLRLKGFPSFPLVERQANEVDWWDMVCNVKKLINEKKEDGKVFWQNLAGYKRQEALRPYLSSEEDRKKGKKFARYQLGDLLLHLEKKHGEDWGKVYDEAWERIDKKVEGLSKHIKLEEERRSEDAQSKAALTDWLRAKASFVIEGLKEADKDEFCRCELKLQKWYGDLRGKPFAIEAENSILDISGFSKQYNCAFIWQKDGVKKLNLYLIINYFKGGKLRFKKIKPEAFEANRFYTVINKKSGEIVPMEVNFNFDDPNLIILPLAFGKRQGREFIWNDLLSLETGSLKLANGRVIEKTLYNRRTRQDEPALFVALTFERREVLDSSNIKPMNLIGVDRGENIPAVIALTDPEGCPLSRFKDSLGNPTHILRIGESYKEKQRTIQAKKEVEQRRAGGYSRKYASKAKNLADDMVRNTARDLLYYAVTQDAMLIFENLSRGFGRQGKRTFMAERQYTRMEDWLTAKLAYEGLPSKTYLSKTLAQYTSKTCSNCGFTITSADYDRVLEKLKKTATGWMTTINGKELKVEGQITYYNRYKRQNVVKDLSVELDRLSEESVNNDISSWDKGRSGEALSLLKKRFSHRPVQEKFVCLNCGFETHADEQAALNIARSWLFLRSQEYKKYQTNKTTGNTDKRAFVETWQSFYRKKLKEVWKPAV

SEQ ID NO: 43786 - protein, 979 aa, Artificial Sequence
  CasX Variant
QEIKRINKIRRRLVKDSNTKKAGKTGPMKTLLVRVMTPDLRERLENLRKKPENIPQPISNTSRANLNKLLTDYTEMKKAILHVYWEEFQKDPVGLMSRVAQPASKKIDQNKLKPEMDEKGNLTTAGFACSQCGQPLFVYKLEQVSEKGKAYTNYFGRCNVAEHEKLILLAQLKPEKDSDEAVTYSLGKFGQRALDFYSIHVTKESTHPVKPLAQIAGNRYASGPVGKALSDACMGTIASFLSKYQDIIIEHQKVVKGNQKRLESLRELAGKENLEYPSVTLPPQPHTKEGVDAYNEVIARVRMWVNLNLWQKLKLSRDDAKPLLRLKGFPSFPLVERQANEVDWWDMVCNVKKLINEKKEDGKVFWQNLAGYKRQEALRPYLSSEEDRKKGKKFARYQLGDLLLHLEKKHGEDWGKVYDEAWERIDKKVEGLSKHIKLEEERRSEDAQSKAALTDWLRAKASFVIEGLKEADKDEFCRCELKLQKWYGDLRGKPFAIEAENSILDISGFSKQYNCAFIWQKDGVKKLNLYLIINYFKGGKLRFKKIKPEAFEANRFYTVINKKSGEIVPMEVNFNFDDPNLIILPLAFGKRQGREFIWNDLLSLETGSLKLANGRVIEKTLYNRRTRQDEPALFVALTFERREVLDSSNIKPMNLIGVDRGENIPAVIALTDPEGCPLSRFKDSLGNPTHILRIGESYKEKQRTIQAKKEVEQRRAGGYSRKYASKAKNLADDMVRNTARDLLYYAVTQDAMLIFENLSRGFGRQGKRTFMAERQYTRMEDWLTAKLAYEGLPSKTYLSKTLAQYTSKTCSNCGFTITSADYDRVLEKLKKTATGWMTTINGKELKVEGQITYYNRYKRQNVVKDLSVELDRLSEESVNNDISSWTKGRSGNEALSLLKKRFSHRPVQEKFVCLNCGFETHADEQAALNIARSWLFLRSQEYKKYQTNKTTGNTDKRAFVETWQSFYRKKLKEVWKPAV

SEQ ID NO: 43787 - protein, 978 aa, Artificial Sequence
  CasX Variant
QEIKRINKIRRRLVKDSNTKKAGKTGPMKTLLVRVMTPDLRERLENLRKKPENIPQPISNTSRANLNKLLTDYTEMKKAILHVYWEEFQKDPVGLMSRVAQPASKKIDQNKLKPEMDEKGNLTTAGFACSQCGQPLFVYKLEQVSEKGKAYTNYFGRCNVAEHEKLILLAQLKPEKDSDEAVTYSLGKFGQRALDFYSIHVTKESTHPVKPLAQIAGNRYASGPVGKALSDACMGTIASFLSKYQDIIIEHQKVVKGNQKRLESLRELAGKENLEYPSVTLPPQPHTKEGVDAYNEVIARVRMWVNLNLWQKLKLSRDDAKPLLRLKGFPSFPLVERQANEVDWWDMVCNVKKLINEKKEDGKVFWQNLAGYKRQEALRPYLSSEEDRKKGKKFARYQLGDLLLHLEKKHGEDWGKVYDEAWERIDKKVEGLSKHIKLEEERRSEDAQSKAALTDWLRAKASFVIEGLKEADKDEFCRCELKLQKWYGDLRGKPFAIEAENSILDISGFSKQYNCAFIWQKDGVKKLNLYLIINYFKGGKLRFKKIKPEAFEANRFYTVINKKSGEIVPMEVNFNFDDPNLIILPLAFGKRQGREFIWNDLLSLETGSLKLANGRVIEKTLYNRRTRQDEPALFVALTFERREVLDSSNIKPMNLIGVDRGENIPAVIALTDPEGCPLSRFKDSLGNPTHILRIGESYKEKQRTIQAKKEVEQRRAGGYSRKYASKAKNLADDMVRNTARDLLYYAVTQDAMLIFENLSRGFGRQGKRTFMAERQYTRMEDWLTAKLAYEGLPSKTYLSKTLAQYTSKTCSNCGFTITSADYDRVLEKLKKTATGWMTTINGKELKVEGQITYYNRYKRQNVVKDLSVELDRLSEESVNNDISSWTKGRSGEALSLLKKRFSHRPVQEKFVCLNCGFETHADEQAALNIARVWLFLRSQEYKKYQTNKTTGNTDKRAFVETWQSFYRKKLKEVWKPAV

SEQ ID NO: 43788 - protein, 978 aa, Artificial Sequence
  CasX Variant
QEIKRINKIRRRLVKDSNTKKAGKTGPMKTLLVRVMTPDLRERLENLRKKPENIPQPISNTSRANLNKLLTDYTEMKKAILHVYWEEFQKDPVGLMSRVAQPASKKIDQNKLKPEMDEKGNLTTAGFACSQCGQPLFVYKLEQVSEKGKAYTNYFGRCNVAEHEKLILLAQLKPEKDSDEAVTYSLGKFGQRALDFYSIHVTKESTHPVKPLAQIAGNRYASGPVGKALSDACMGTIASFLSKYQDIIIEHQKVVKGNQKRLESLRELAGKENLEYPSVTLPPQPHTKEGVDAYNEVIARVRMWVNLNLWQKLKLSRDDAKPLLRLKGFPSFPLVERQANEVDWWDMVCNVKKLINEKKEDGKVFWQNLAGYKRQEALRPYLSSEEDRKKGKKFARYQLGDLLLHLEKKHGEDWGKVYDEAWERIDKKVEGLSKHIKLEEERRSEDAQSKAALTDWLRAKASFVIEGLKEADKDEFCRCELKLQKWYGDLRGKPFAIEAENSILDISGFSKQYNCAFIWQKDGVKKLNLYLIINYFKGGKLRFKKIKPEAFEANRFYTVINKKSGEIVPMEVNFNFDDPNLIILPLAFGKRQGREFIWNDLLSLETGSLKLANGRVIEKTLYNRRTRQDEPALFVALTFERREVLDSSNIKPMNLIGVDRGENIPAVIALTDPEGCPLSRFKDSLGNPTHILRIGESYKEKQRTIQAKKEVEQRRAGGYSRKYASKAKNLADDMVRNTARDLLYYAVTQDAMLIFENLSRGFGRQGKRTFMAERQYTRMEDWLTAKLAYEGLPSKTYLSKTLAQYTSKTCSNCGFTITSADYDRVLEKLKKTATGWMTTINGKELKVEGQITYYNRYKRQNVVKDLSVELDRLSEESVNNDISSWTKGRSGEALSLLKKRFSHRPVQEKFVCLNCGFETHADEQAALNIARSWLFLRSQEYKKYQTNKTTINTDKRAFVETWQSFYRKKLKEVWKPAV

SEQ ID NO: 43789 - protein, 977 aa, Artificial Sequence
  CasX Variant
QEIKRINKIRRRLVKDSNTKKAGKTGPMKTLLVRVMTPDLRERLENLRKKPENIPQPISNTSRANLNKLLTDYTEMKKAILHVYWEEFQKDPVGLMSRVAQPASKKIDQNKLKPEMDEKGNLTTAGFACSQCGQPLFVYKLEQVSEKGKAYTNYFGRCNVAEHEKLILLAQLKPEKDSDEAVTYSLGKFGQRALDFYSIHVTKESTHPVKPLAQIAGNRYASGPVGKALSDACMGTIASFLSKYQDIIIEHQKVVKGNQKRLESLRELAGKENLEYPSVTLPPQPHTKEGVDAYNEVIARVRMWVNLNLWQKLKLSRDDAKPLLRLKGFPSFPLVERQANEVDWWDMVCNVKKLINEKKEDGKVFWQNLAGYKRQEALRPYLSSPEDRKKGKKFARYQFGDLLLHLEKKHGEDWGKVYDEAWERIDKKVEGLSKHIKLEEERRSEDAQSKAALTDWLRAKASFVIEGLKEADKDEFCRCELKLQKWYGDLRGKPFAIEAENSILDISGFSKQYNCAFIWQKDGVKKLNLYLIINYFKGGKLRFKKIKPEAFEANRFYTVINKKSGEIVPMEVNFNFDDPNLIILPLAFGKRQGREFIWNDLLSLETGSLKLANGRVIEKTLYNRRTRQDEPALFVALTFERREVLDSSNIKPMNLIGVDRGENIPAVIALTDPEGCPLSRFKDSLGNPTHILRIGESYKEKQRTIQAKKEVEQRRAGGYSRKYASKAKNLANDMVRNTARDLLYYAVTQDAMLIFENLSRGFGRQGKRTFMAERQYTRMEDWLTAKLAYEGLSKTYLSKTLAQYTSKTCSNCGFTITSADYDRVLEKLKKTATGWMTTINGKELKVEGQITYYNRRKRQNVVKDLSVELDRLSEESVNNDISSWTKGRSGEALSLLKKRFSHRPVQEKFVCLNCGFETHADEQAALNIARSWLFLRSQEYKKYQTNKTTGNTDKRAFVETWQSFYRKKLKEVWKPAV

SEQ ID NO: 43790 - protein, 977 aa, Artificial Sequence
  CasX Variant
QEIKRINKIRRRLVKDSNTKKAGKTGPMKTLLVRVMTPDLRERLENLRKKPENIPQPISNTSRANLNKLLTDYTEMKKAILHVYWEEFQKDPVGLMSRVAQPASKKIDQNKLKPEMDEKGNLTTAGFACSQCGQPLFVYKLEQVSEKGKAYTNYFGRCNVAEHEKLILLAQLKPEKDSDEAVTYSLGKFGQRALDFYSIHVTKESTHPVKPLAQIAGNRYASGPVGKALSDACMGTIASFLSKYQDIIIEHQKVVKGNQKRLESLRELAGKENLEYPSVTLPPQPHTKEGVDAYNEVIARVRMWVNLNLWQKLKLSRDDAKPLLRLKGFPSFPLVERQANEVDWWDMVCNVKKLINEKKEDGKVFWQNLAGYKRQEALRPYLSSEEDRKKGKKFARYQLGDLLLHLEKKHGEDWGKVYDEAWERIDKKVEGLSKHIKLEEERRSEDAQSKAALTDWLRAKASFVIEGLKEADKDEFSRCELKLQKWYGDLRGKPFAIEAENSILDISGFSKQYNCAFIWQKDGVKKLNLYLIINYFKGGKLRFKKIKPEAFEANRFYTVINKKSGEIVPMEVNFNFDDPNLIILPLAFGKRQGREFIWNDLLSLETGSLKLANGRVIEKTLYNRRTRQDEPALFVALTFERREVLDSSNIKPMNLIGVDRGENIPAVIALTDPEGCPLSRFKDSLGNPTHILRIGESYKEKQRTIQAKKEVEQRRAGGYSRKYASKAKNLADDMVRNTARDLLYYAVTQDAMLIFENLSRGFGRQGKRTFMAERQYTRMEDWLTAKLAYEGLSKTYLSKTLAQYTSKTCSNCGFTITSADYDRVLEKLKKTATGWMTTINGKELKVEGQITYYNRRKRQNVVKDLSVELDRLSEESVNNDISSWTKGRSGEALSLLKKRFSHRPVQEKFVCLNCGFETHADEQAALNIARSWLFLRSQEYKKYQTNKTTGNTDKRAFVETWQSFYRKKLKEVWKPAV

SEQ ID NO: 43791 - protein, 977 aa, Artificial Sequence
  CasX Variant
QEIKRINKIRRRLVKDSNTKKAGKTGPMKTLLVRVMTPDLRERLENLRKKPENIPQPISNTSRANLNKLLTDYTEMKKAILHVYWEEFQKDPVGLMSRVAQPASKKIDQNKLKPEMDEKGNLTTAGFACSQCGQPLFVYKLEQVSEKGKAYTNYFGRCNVAEHEKLILLAQLKPEKDSDEAVTYSLGKFGQRALDFYSIHVTKESTHPVKPLAQIAGNRYASGPVGKALSDACMGTIASFLSKYQDIIIEHQKVVKGNQKRLESLRELAGKENLEYPSVTLPPQPHTKEGVDAYNEVIARVRMWVNLNLWQKLKLSRDDAKPLLRLKGFPSFPLVERQANEVDWWDMVCNVKKLINEKKEDGKVFWQNLAGYKRQEALRPYLSSENDRKKGKKFARYQFGDLLKHLEKKHGEDWGKVYDEAWERIDKKVEGLSKHIKLEEERRSEDAQSKAALTDWLRAKASFVIEGLKEADKDEFSRCELKLQKWYGDLRGKPFAIEAENSILDISGFSKQYNCAFIWQKDGVKKLNLYLIINYFKGGKLRFKKIKPEAFEANRFYTVINKKSGEIVPMEVNFNFDDPNLIILPLAFGKRQGREFIWNDLLSLETGSLKLANGRVIEKTLYNRRTRQDEPALFVALTFERREVLDSSNIKPMNLIGVDRGENIPAVIALTDPEGCPLSRFKDSLGNPTHILRIGESYKEKQRTIQAKKEVEQRRAGGYSRKYASKAKNLADDMVRNTARDLLYYAVTQDAMLIFENLSRGFGRQGKRTFMAERQYTRMEDWLTAKLAYEGLSKTLLSKTLAQYTSKTCSNCGFTITSADYDRVLEKLKKTATGWMTTINGKELKVEGQITYYNRRKRQNVVKDLSVELDRLSEESVNNDISSWTKGRSGEALSLLKKRFSHRPVQEKFVCLNCGFETHADEQAALNIARSWLFLRSQEYKKYQTNKTTGNTDKRAFVETWQSFYRKKLKEVWKPAV

SEQ ID NO: 43792 - protein, 977 aa, Artificial Sequence
  CasX Variant
QEIKRINKIRRRLVKDSNTKKAGKTGPMKTLLVRVMTPDLRERLENLRKKPENIPQPISNTSRANLNKLLTDYTEMKKAILHVYWEEFQKDPVGLMSRVAQPASKKIDQNKLKPEMDEKGNLTTAGFACSQCGQPLFVYKLEQVSEKGKAYTNYFGRCNVAEHEKLILLAQLKPEKDSDEAVTYSLGKFGQRALDFYSIHVTKESTHPVKPLAQIAGNRYASGPVGKALSDACMGTIASFLSKYQDIIIEHQKVVKGNQKRLESLRELAGKENLEYPSVTLPPQPHTKEGVDAYNEVIARVRMWVNLNLWQKLKLSRDDAKPLLRLKGFPSFPLVERQANEVDWWDMVCNVKKLINEKKEDGKVFWQNLAGYKRQEALRPYLSSPEDRKKGKKFARYQLGDLLLHLEKKHGEDWGKVYDEAWERIDKKVEGLSKHIKLEEERRSEDAQSKAALTDWLRAKASFVIEGLKEADKDEFCRCELKLQKWYGDLRGKPFAIEAENSILDISGFSKQYNCAFIWQKDGVKKLNLYLIINYFKGGKLRFKKIKPEAFEANRFYTVINKKSGEIVPMEVNFNFDDPNLIILPLAFGKRQGREFIWNDLLSLETGSLKLANGRVIEKTLYNRRTRQDEPALFVALTFERREVLDSSNIKPMNLIGVDRGENIPAVIALTDPEGCPLSRFKDSLGNPTHILRIGESYKEKQRTIQAKKEVEQRRAGGYSRKYASKAKNLANDMVRNTARDLLYYAVTQDAMLIFENLSRGFGRQGKRTFMAERQYTRMEDWLTAKLAYEGLSKTYLSKTLAQYTSKTCSNCGFTITSADYDRVLEKLKKTATGWMTTINGKELKVEGQITYYNRRKRQNVVKDLSVELDRLSEESVNNDISSWTKGRSGEALSLLKKRFSHRPVQEKFVCLNCGFETHADEQAALNIARSWLFLRSQEYKKYQTNKTTGNTDKRAFVETWQSFYRKKLKEVWKPAV

SEQ ID NO: 43793 - protein, 977 aa, Artificial Sequence
  CasX Variant
QEIKRINKIRRRLVKDSNTKKAGKTGPMKTLLVRVMTPDLRERLENLRKKPENIPQPISNTSRANLNKLLTDYTEMKKAILHVYWEEFQKDPVGLMSRVAQPASKKIDQNKLKPEMDEKGNLTTAGFACSQCGQPLFVYKLEQVSEKGKAYTNYFGRCNVAEHEKLILLAQLKPEKDSDEAVTYSLGKFGQRALDFYSIHVTKESTHPVKPLAQIAGNRYASGPVGKALSDACMGTIASFLSKYQDIIIEHQKVVKGNQKRLESLRELAGKENLEYPSVTLPPQPHTKEGVDAYNEVIARVRMWVNLNLWQKLKLSRDDAKPLLRLKGFPSFPLVERQANEVDWWDMVCNVKKLINEKKEDGKVFWQNLAGYKRQEALRPYLSSPEDRKKGKKFARYQLGDLLLHLEKKHGEDWGKVYDEAWERIDKKVEGLSKHIKLEEERRSEDAQSKAALTDWLRAKASFVIEGLKEADKDEFCRCELKLQKWYGDLRGKPFAIEAENSILDISGFSKQYNCAFIWQKDGVKKLNLYLIINYFKGGKLRFKKIKPEAFEANRFYTVINKKSGEIVPMEVNFNFDDPNLIILPLAFGKRQGREFIWNDLLSLETGSLKLANGRVIEKPLYNRRTRQDEPALFVALTFERREVLDSSNIKPMNLIGVDRGENIPAVIALTDPEGCPLSRFKDSLGNPTHILRIGESYKEKQRTIQAKKEVEQRRAGGYSRKYASKAKNLADDMVRNTARDLLYYAVTQDAMLIFENLSRGFGRQGKRTFMAERQYTRMEDWLTAKLAYEGLSKTYLSKTLAQYTSKTCSNCGFTITSADYDRVLEKLKKTATGWMTTINGKELKVEGQITYYNRRKRQNVVKDLSVELDRLSEESVNNDISSWTKGRSGEALSLLKKRFSHRPVQEKFVCLNCGFETHADEQAALNIARSWLFLRSQEYKKYQTNKTTGNTDKRAFVETWQSFYRKKLKEVWKPAV

SEQ ID NO: 43794 - protein, 978 aa, Artificial Sequence
  CasX Variant
QEIKRINKIRRRLVKDSNTKKAGKTGPMKTLLVRVMTPDLRERLENLRKKPENIPQPISNTSRANLNKLLTDYTEMKKAILHVYWEEFQKDPVGLMSRVAQPASKKIDQNKLKPEMDEKGNLTTAGFACSQCGQPLFVYKLEQVSEKGKAYTNYFGRCNVAEHEKLILLAQLKPEKDSDEAVTYSLGKFGQRALDFYSIHVTKESTHPVKPLAQIAGNRYASGPVGKALSDACMGTIASFLSKYQDIIIEHQKVVKGNQKRLESLRELAGKENLEYPSVTLPPQPHTKEGVDAYNEVIARVRMWVNLNLWQKLKLSRDDAKPLLRLKGFPSFPLVERQANEVDWWDMVCNVKKLINEKKEDGKVFWQNLAGYKRQEALRPYLSSEEDRKKGKKFARYQLGDLLLHLEKKHGEDWGKVYDEAWERIDKKVEGLSKHIKLEEERRSEDAQSKAALTDWLRAKASFVIEGLKEADKDEFCRCELKLQKWYGDLRGKPFAIEAENSILDISGFSKQYNCAFIWQKDGVKKLNLYLIINYFKGGKLRFKKIKPEAFEANRFYTVINKKSGEIVPMEVNFNFDDPNLIILPLAFGKRQGREFIWNDLLSLETGSLKLANGRVIEKTLYNRRTRQDEPALFVALTFEDREVLDSSNIKPMNLIGVDRGENIPAVIALTDPEGCPLSRFKDSLGNPTHILRIGESYKEKQRTIQAKKEVEQRRAGGYSRKYASKAKNLADDMVRNTARDLLYYAVTQDAMLIFENLSRGFGRQGKRTFMAERQYTRMEDWLTAKLAYEGLPSKTYLSKTLAQYTSKTCSNCGFTITSADYDRVLEKLKKTATGWMTTINGKELKVEGQITYYNRYKRQNVVKDLSVELDRLSEESVNNDISSWTKGRSGEALSLLKKRFSHRPVQEKFVCLNCGFETHADEQAALNIARSWLFLRSQEYKKYQTNKTTGNTDKRAFVETWQSFYRKKLKEVWKPAV

SEQ ID NO: 43795 - protein, 979 aa, Artificial Sequence
  CasX Variant
QEIKRINKIRRRLVKDSNTKKAGKTGPMKTLLVRVMTPDLRERLENLRKKPENIPQPISNTSRANLNKLLTDYTEMKKAILHVYWEEFQKDPVGLMSRVAQPASKKIDQNKLKPEMDEKGNLTTAGFACSQCGQPLFVYKLEQVSEKGKAYTNYFGRCNVAEHEKLILLAQLKPEKDSDEAVTYSLGKFGQRALDFYSIHVTKESTHPVKPLAQIAGNRYASGPVGKALSDACMGTIASFLSKYQDIIIEHQKVVKGNQKRLESLRELAGKENLEYPSVTLPPQPHTKEGVDAYNEVIARVRMWVNLNLWQKLKLSRDDAKPLLRLKGFPSFPLVERQANEVDWWDMVCNVKKLINEKKEDGKVFWQNLAGYKRQEALRPYLSSEEDRKKGKKFARYQLGDLLLHLEKKHGEDWGKVYDEAWERIDKKVEGLSKHIKLEEERRSEDAQSKAALTDWLRAKASFVIEGLKEADKDEFCRCELKLQKWYGDLRGKHPFAIEAENSILDISGFSKQYNCAFIWQKDGVKKLNLYLIINYFKGGKLRFKKIKPEAFEANRFYTVINKKSGEIVPMEVNFNFDDPNLIILPLAFGKRQGREFIWNDLLSLETGSLKLANGRVIEKTLYNRRTRQDEPALFVALTFERREVLDSSNIKPMNLIGVDRGENIPAVIALTDPEGCPLSRFKDSLGNPTHILRIGESYKEKQRTIQAKKEVEQRRAGGYSRKYASKAKNLADDMVRNTARDLLYYAVTQDAMLIFENLSRGFGRQGKRTFMAERQYTRMEDWLTAKLAYEGLPSKTYLSKTLAQYTSKTCSNCGFTITSADYDRVLEKLKKTATGWMTTINGKELKVEGQITYYNRYKRQNVVKDLSVELDRLSEESVNNDISSWTKGRSGEALSLLKKRFSHRPVQEKFVCLNCGFETHADEQAALNIARSWLFLRSQEYKKYQTNKTTGNTDKRAFVETWQSFYRKKLKEVWKPAV

SEQ ID NO: 43796 - protein, 979 aa, Artificial Sequence
  CasX Variant
QEIKRINKIRRRLVKDSNTKKAGKTGPMKTLLVRVMTPDLRERLENLRKKPENIPQPISNTSRANLNKLLTDYTEMKKAILHVYWEEFQKDPVGLMSRVAQPASKKIDQNKLKPEMDEKGNLTTAGFACSQCGQPLFVYKLEQVSEKGKAYTNYFGRCNVAEHEKLILLAQLKPEKDSDEAVTYSLGKFGQRALDFYSIHVTKESTHPVKPLAQIAGNRYASGPVGKALSDACMGTIASFLSKYQDIIIEHQKVVKGNQKRLESLRELAGKENLEYPSVTLPPQPHTKEGVDAYNEVIARVRMWVNLNLWQKLKLSRDDAKPLLRLKGFPSFPLVERQANEVDWWDMVCNVKKLIINEKKEDGKVFWQNLAGYKRQEALRPYLSSEEDRKKGKKFARYQLGDLLLHLEKKHGEDWGKVYDEAWERIDKKVEGLSKHIKLEEERRSEDAQSKAALTDWLRAKASFVIEGLKEADKDEFCRCELKLQKWYGDLRGKPFAIEAENSILDISGFSKQYNCAFIWQKDGVKKLNLYLIINYFKGGKLRFKKIKPEAFEANRFYTVINKKSGEIVPMEVNFNFDDPNLIILPLAFGKRQGREFIWNDLLSLETGSLKLANGRVIEKTLYNRRTRQDEPALFVALTFERREVLDSSNIKPMNLIGVDRGENIPAVIALTDPEGCPLSRFKDSLGNPTHILRIGESYKEKQRTIQAKKEVEQRRAGGYSRKYASKAKNLADDMVRNTARDLLYYAVTQDAMLIFENLSRGFGRQGKRTFMAERQYTRMEDWLTAKLAYEGLPSKTYLSKTLAQYTSKTCSNCGFTITSADYDRVLEKLKKTATGWMTTINGKELKVEGQITYYNRYKRQNVVKDLSVELDRLSEESVNNDISSWTKGRSGEALSLLKKRFSHRPVQEKFVCLNCGFETHADEQAALNIARSWLFLRSQEYKKYQTNKTTGNTDKRAFVETWQSFYRKKLKEVWKPAV

SEQ ID NO: 43797 - protein, 979 aa, Artificial Sequence
  CasX Variant
QEIKRINKIRRRLVKDSNTKKAGKTRGPMKTLLVRVMTPDLRERLENLRKKPENIPQPISNTSRANLNKLLTDYTEMKKAILHVYWEEFQKDPVGLMSRVAQPASKKIDQNKLKPEMDEKGNLTTAGFACSQCGQPLFVYKLEQVSEKGKAYTNYFGRCNVAEHEKLILLAQLKPEKDSDEAVTYSLGKFGQRALDFYSIHVTKESTHPVKPLAQIAGNRYASSPVGKALSDACMGTIASFLSKYQDIIIEHQKVVKGNQKRLESLRELAGKENLEYPSVTLPPQPHTKEGVDAYNEVIARVRMWVNLNLWQKLKLSRDDAKPLLRLKGFPSFPLVERQANEVDWWDMVCNVKKLINEKKEDGKVFWQNLAGYKRQEALRPYLSSEEDRKKGKKFARYQLGDLLLHLEKKHGEDWGKVYDEAWERIDKKVEGLSKHIKLEEERRSEDAQSKAALTDWLRAKASFVIEGLKEADKDEFCRCELKLQKWYGDLRGKPFAIEAENSILDISGFSKQYNCAFIWQKDGVKKLNLYLIINYFKGGKLRFKKIKPEAFEANRFYTVINKKSGEIVPMEVNFNFDDPNLIILPLAFGKRQGREFIWNDLLSLETGSLKLANGRVIEKTLYNRRTRQDEPALFVALTFERREVLDSSNIKPMNLIGVDRGENIPAVIALTDPEGCPLSRFKDSLGNPTHILRIGESYKEKQRTIQAKKEVEQRRAGGYSRKYASKAKNLADDMVRNTARDLLYYAVTQDAMLIFENLSRGFGRQGKRTFMAERQYTRMEDWLTAKLAYEGLPSKTYLSKTLAQYTSKTCSNCGFTITSADYDRVLEKLKKTATGWMTTINGKELKVEGQITYYNRYKRQNVVKDLSVELDRLSEESVNNDISSWTKGRSGEALSLLKKRFSHRPVQEKFVCLNCGFETHADEQAALNIARSWLFLRSQEYKKYQTNKTTGNTDKRAFVETWQSFYRKKLKEVWKPAV

SEQ ID NO: 43798 - protein, 979 aa, Artificial Sequence
  CasX Variant
QEIKRINKIRRRLVKDSNTKKAGKTRGPMKTLLVRVMTPDLRERLENLRKKPENIPQPISNTSRANLNKLLTDYTEMKKAILHVYWEEFQKDPVGLMSRVAQPASKKIDQNKLKPEMDEKGNLTTAGFACSQCGQPLFVYKLEQVSEKGKAYTNYFGRCNVAEHEKLILLAQLKPEKDSDEAVTYSLGKFGQRALDFYSIHVTKESTHPVKPLAQIAGNRYASGPVGKALSGACMGTIASFLSKYQDIIIEHQKVVKGNQKRLESLRELAGKENLEYPSVTLPPQPHTKEGVDAYNEVIARVRMWVNLNLWQKLKLSRDDAKPLLRLKGFPSFPLVERQANEVDWWDMVCNVKKLINEKKEDGKVFWQNLAGYKRQEALRPYLSSEEDRKKGKKFARYQLGDLLLHLEKKHGEDWGKVYDEAWERIDKKVEGLSKHIKLEEERRSEDAQSKAALTDWLRAKASFVIEGLKEADKDEFCRCELKLQKWYGDLRGKPFAIEAENSILDISGFSKQYNCAFIWQKDGVKKLNLYLIINYFKGGKLRFKKIKPEAFEANRFYTVINKKSGEIVPMEVNFNFDDPNLIILPLAFGKRQGREFIWNDLLSLETGSLKLANGRVIEKTLYNRRTRQDEPALFVALTFERREVLDSSNIKPMNLIGVDRGENIPAVIALTDPEGCPLSRFKDSLGNPTHILRIGESYKEKQRTIQAKKEVEQRRAGGYSRKYASKAKNLADDMVRNTARDLLYYAVTQDAMLIFENLSRGFGRQGKRTFMAERQYTRMEDWLTAKLAYEGLPSKTYLSKTLAQYTSKTCSNCGFTITSADYDRVLEKLKKTATGWMTTINGKELKVEGQITYYNRYKRQNVVKDLSVELDRLSEESVNNDISSWTKGRSGEALSLLKKRFSHRPVQEKFVCLNCGFETHADEQAALNIARSWLFLRSQEYKKYQTNKTTGNTDKRAFVETWQSFYRKKLKEVWKPAV

SEQ ID NO: 43799 - protein, 978 aa, Artificial Sequence
  CasX Variant
QEIKRINKIRRRLVKDSNTKKAGKTGPMKTLLVRVMTPDLRERLENLRKKPENIPQPISNTSRANLNKLLTDYTEMKKAILHVYWEEFQKDPVGLMSRVAQPASKKIDQNKLKPEMDEKGNLTTAGFACSQCGQPLFVYKLEQVSEKGKAYTNYFGRCNVAEHEKLILLAQLKPEKDSDEAVTYSLGKFGQRALDFYSIHVTKESTHPVKPLAQIAGNRYASGPVGKALSDACMGTIASFLSKYQDIIIEHQKVVKGNQKRLESLRELAGKENLEYPSVTLPPQPHTKEGVDAYNEVIARVRMWVNLNLWQKLKLSRDDAKPLLRLKGFPSFPLVERQANEVDWWDMVCNVKKLINEKKEDGKVFWQNLAGYKRQEALRPYLSSPEDRKKGKKFARYQFGDLLLHLEKKHGEDWGKVYDEAWERIDKKVEGLSKHIKLEEERRSEDAQSKAALTDWLRAKASFVIEGLKEADKDEFCRCELKLQKWYGDLRGKPFAIEAENSILDISGFSKQYNCAFIWQKDGVKKLNLYLIINYFKGGKLRFKKIKPEAFEANRFYTVINKKSGEIVPMEVNFNFDDPNLIILPLAFGKRQGREFIWNDLLSLETGSLKLANGRVIEKTLYNRRTRQDEPALFVALTFERREVLDSSNIKPMNLIGVDRGENIPAVIALTDPEGCPLSRFKDSLGNPTHILRIGESYKEKQRTIQAKKEVEQRRAGGYSRKYASKAKNLANDMVRNTARDLLYYAVTQDAMLIFENLSRGFGRQGKRTFMAERQYTRMEDWLTAKLAYEGLPSKTYLSKTLAQYTSKTCSNCGFTITSADYDRVLEKLKKTATGWMTTINGKELKVEGQITYYNRRKRQNVVKDLSVELDRLSEESVNNDISSWTKGRSGEALSLLKKRFSHRPVQEKFVCLNCGFETHADEQAALNIARSWLFLRSQEYKKYQTNKTTGNTDKRAFVETWQSFYRKKLKEVWKPAV

SEQ ID NO: 43800 - protein, 978 aa, Artificial Sequence
  CasX Variant
QEIKRINKIRRRLVKDSNTKKAGKTGPMKTLLVRVMTPDLRERLENLRKKPENIPQPISNTSRANLNKLLTDYTEMKKAILHVYWEEFQKDPVGLMSRVAQPASKKIDQNKLKPEMDEKGNLTTAGFACSQCGQPLFVYKLEQVSEKGKAYTNYFGRCNVAEHEKLIKLAQLKPEKDSDEAVTYSLGKFGQRALDFYSIHVTKESTHPVKPLAQIAGNRYASSPVGKALSDACMGTIASFLSKYQDIIIEHQKVVKGNQKRLESLRELAGKENLEYPSVTLPPQPHTKEGVDAYNEVIARVRMWVNLNLWQKLKLSRDDAKPLLRLKGFPSFPLVERQANEVDWWDMVCNVKKLINEKKEDGKVFWQNLAGYKRQEALRPYLSSEEDRKKGKKFARYQLGDLLLHLEKKHGEDWGKVYDEAWERIDKKVEGLSKHIKLEEERRSEDAQSKAALTDWLRAKASFVIEGLKEADKDEFCRCELKLQKWYGDLRGKPFAIEAENSILDISGFSKQYNCAFIWQKDGVKKLNLYLIINYFKGGKLRFKKIKPEAFEANRFYTVINKKSGEIVPMEVNFNFDDPNLIILPLAFGKRQGREFIWNDLLSLETGSLKLANGRVIEKTLYNRRTRQDEPALFVALTFERREVLDSSNIKPMNLIGVDRGENIPAVIALTDPEGCPLSRFKDSLGNPTHILRIGESYKEKQRTIQAKKEVEQRRAGGYSRKYASKAKNLADDMVRNTARDLLYYAVTQDAMLIFENLSRGFGRQGKRTFMAERQYTRMEDWLTAKLAYEGLPSKTYLSKTLAQYTSKTCSNCGFTITSADYDRVLEKLKKTATGWMTTINGKELKVEGQITYYNRYKRQNVVKDLSVELDRLSEESVNNDISSWTKGRSGEALSLLKKRFSHRPVQEKFVCLNCGFETHADEQAALNIARSWLFLRSQEYKKYQTNKTTGNTDKRAFVETWQSFYRKKLKEVWKPAV

SEQ ID NO: 43801 - protein, 978 aa, Artificial Sequence
  CasX Variant
QEIKRINKIRRRLVKDSNTKKAGKTGPMKTLLVRVMTPDLRERLENLRKKPENIPQPISNTSRANLNKLLTDYTEMKKAILHVYWEEFQKDPVGLMSRVAQPASKKIDQNKLKPEMDEKGNLTTAGFACSQCGQPLFVYKLEQVSEKGKAYTNYFGRCNVAEHEKLILLAQLKPEKDSDEAVTYSLGKFGQRALDFYSIHVTKESTHPVKPLAQIAGNRYASSPVGKALSGACMGTIASFLSKYQDIIIEHQKVVKGNQKRLESLRELAGKENLEYPSVTLPPQPHTKEGVDAYNEVIARVRMWVNLNLWQKLKLSRDDAKPLLRLKGFPSFPLVERQANEVDWWDMVCNVKKLINEKKEDGKVFWQNLAGYKRQEALRPYLSSEEDRKKGKKFARYQLGDLLLHLEKKHGEDWGKVYDEAWERIDKKVEGLSKHIKLEEERRSEDAQSKAALTDWLRAKASFVIEGLKEADKDEFCRCELKLQKWYGDLRGKPFAIEAENSILDISGFSKQYNCAFIWQKDGVKKLNLYLIINYFKGGKLRFKKIKPEAFEANRFYTVINKKSGEIVPMEVNFNFDDPNLIILPLAFGKRQGREFIWNDLLSLETGSLKLANGRVIEKTLYNRRTRQDEPALFVALTFERREVLDSSNIKPMNLIGVDRGENIPAVIALTDPEGCPLSRFKDSLGNPTHILRIGESYKEKQRTIQAKKEVEQRRAGGYSRKYASKAKNLADDMVRNTARDLLYYAVTQDAMLIFENLSRGFGRQGKRTFMAERQYTRMEDWLTAKLAYEGLPSKTYLSKTLAQYTSKTCSNCGFTITSADYDRVLEKLKKTATGWMTTINGKELKVEGQITYYNRYKRQNVVKDLSVELDRLSEESVNNDISSWTKGRSGEALSLLKKRFSHRPVQEKFVCLNCGFETHADEQAALNIARSWLFLRSQEYKKYQTNKTTGNTDKRAFVETWQSFYRKKLKEVWKPAV

SEQ ID NO: 43802 - protein, 978 aa, Artificial Sequence
  CasX Variant
QEIKRINKIRRRLVKDSNTKKAGKTGPMKTLLVRVMTPDLRERLENLRKKPENIPQPISNTSRANLNKLLTDYTEMKKAILHVYWEEFQKDPVGLMSRVAQPASKKIDQNKLKPEMDEKGNLTTAGFACSQCGQPLFVYKLEQVSEKGKAYTNYFGRCNVAEHEKLIKLAQLKPEKDSDEAVTYSLGKFGQRALDFYSIHVTKESTHPVKPLAQIAGNRYASSPVGKALSGACMGTIASFLSKYQDIIIEHQKVVKGNQKRLESLRELAGKENLEYPSVTLPPQPHTKEGVDAYNEVIARVRMWVNLNLWQKLKLSRDDAKPLLRLKGFPSFPLVERQANEVDWWDMVCNVKKLINEKKEDGKVFWQNLAGYKRQEALRPYLSSEEDRKKGKKFARYQLGDLLLHLEKKHGEDWGKVYDEAWERIDKKVEGLSKHIKLEEERRSEDAQSKAALTDWLRAKASFVIEGLKEADKDEFCRCELKLQKWYGDLRGKPFAIEAENSILDISGFSKQYNCAFIWQKDGVKKLNLYLIINYFKGGKLRFKKIKPEAFEANRFYTVINKKSGEIVPMEVNFNFDDPNLIILPLAFGKRQGREFIWNDLLSLETGSLKLANGRVIEKTLYNRRTRQDEPALFVALTFERREVLDSSNIKPMNLIGVDRGENIPAVIALTDPEGCPLSRFKDSLGNPTHILRIGESYKEKQRTIQAKKEVEQRRAGGYSRKYASKAKNLADDMVRNTARDLLYYAVTQDAMLIFENLSRGFGRQGKRTFMAERQYTRMEDWLTAKLAYEGLPSKTYLSKTLAQYTSKTCSNCGFTITSADYDRVLEKLKKTATGWMTTINGKELKVEGQITYYNRYKRQNVVKDLSVELDRLSEESVNNDISSWTKGRSGEALSLLKKRFSHRPVQEKFVCLNCGFETHADEQAALNIARSWLFLRSQEYKKYQTNKTTGNTDKRAFVETWQSFYRKKLKEVWKPAV

SEQ ID NO: 43803 - protein, 979 aa, Artificial Sequence
  CasX Variant
QEIKRINKIRRRLVKDSNTKKAGKTRGPMKTLLVRVMTPDLRERLENLRKKPENIPQPISNTSRANLNKLLTDYTEMKKAILHVYWEEFQKDPVGLMSRVAQPASKKIDQNKLKPEMDEKGNLTTAGFACSQCGQPLFVYKLEQVSEKGKAYTNYFGRCNVAEHEKLIKLAQLKPEKDSDEAVTYSLGKFGQRALDFYSIHVTKESTHPVKPLAQIAGNRYASGPVGKALSDACMGTIASFLSKYQDIIIEHQKVVKGNQKRLESLRELAGKENLEYPSVTLPPQPHTKEGVDAYNEVIARVRMWVNLNLWQKLKLSRDDAKPLLRLKGFPSFPLVERQANEVDWWDMVCNVKKLINEKKEDGKVFWQNLAGYKRQEALRPYLSSEEDRKKGKKFARYQLGDLLLHLEKKHGEDWGKVYDEAWERIDKKVEGLSKHIKLEEERRSEDAQSKAALTDWLRAKASFVIEGLKEADKDEFCRCELKLQKWYGDLRGKPFAIEAENSILDISGFSKQYNCAFIWQKDGVKKLNLYLIINYFKGGKLRFKKIKPEAFEANRFYTVINKKSGEIVPMEVNFNFDDPNLIILPLAFGKRQGREFIWNDLLSLETGSLKLANGRVIEKTLYNRRTRQDEPALFVALTFERREVLDSSNIKPMNLIGVDRGENIPAVIALTDPEGCPLSRFKDSLGNPTHILRIGESYKEKQRTIQAKKEVEQRRAGGYSRKYASKAKNLADDMVRNTARDLLYYAVTQDAMLIFENLSRGFGRQGKRTFMAERQYTRMEDWLTAKLAYEGLPSKTYLSKTLAQYTSKTCSNCGFTITSADYDRVLEKLKKTATGWMTTINGKELKVEGQITYYNRYKRQNVVKDLSVELDRLSEESVNNDISSWTKGRSGEALSLLKKRFSHRPVQEKFVCLNCGFETHADEQAALNIARSWLFLRSQEYKKYQTNKTTGNTDKRAFVETWQSFYRKKLKEVWKPAV

SEQ ID NO: 43804 - protein, 979 aa, Artificial Sequence
  CasX Variant
QEIKRINKIRRRLVKDSNTKKAGKTRGPMKTLLVRVMTPDLRERLENLRKKPENIPQPISNTSRANLNKLLTDYTEMKKAILHVYWEEFQKDPVGLMSRVAQPASKKIDQNKLKPEMDEKGNLTTAGFACSQCGQPLFVYKLEQVSEKGKAYTNYFGRCNVAEHEKLIKLAQLKPEKDSDEAVTYSLGKFGQRALDFYSIHVTKESTHPVKPLAQIAGNRYASSPVGKALSDACMGTIASFLSKYQDIIIEHQKVVKGNQKRLESLRELAGKENLEYPSVTLPPQPHTKEGVDAYNEVIARVRMWVNLNLWQKLKLSRDDAKPLLRLKGFPSFPLVERQANEVDWWDMVCNVKKLINEKKEDGKVFWQNLAGYKRQEALRPYLSSEEDRKKGKKFARYQLGDLLLHLEKKHGEDWGKVYDEAWERIDKKVEGLSKHIKLEEERRSEDAQSKAALTDWLRAKASFVIEGLKEADKDEFCRCELKLQKWYGDLRGKPFAIEAENSILDISGFSKQYNCAFIWQKDGVKKLNLYLIINYFKGGKLRFKKIKPEAFEANRFYTVINKKSGEIVPMEVNFNFDDPNLIILPLAFGKRQGREFIWNDLLSLETGSLKLANGRVIEKTLYNRRTRQDEPALFVALTFERREVLDSSNIKPMNLIGVDRGENIPAVIALTDPEGCPLSRFKDSLGNPTHILRIGESYKEKQRTIQAKKEVEQRRAGGYSRKYASKAKNLADDMVRNTARDLLYYAVTQDAMLIFENLSRGFGRQGKRTFMAERQYTRMEDWLTAKLAYEGLPSKTYLSKTLAQYTSKTCSNCGFTITSADYDRVLEKLKKTATGWMTTINGKELKVEGQITYYNRYKRQNVVKDLSVELDRLSEESVNNDISSWTKGRSGEALSLLKKRFSHRPVQEKFVCLNCGFETHADEQAALNIARSWLFLRSQEYKKYQTNKTTGNTDKRAFVETWQSFYRKKLKEVWKPAV

SEQ ID NO: 43805 - protein, 979 aa, Artificial Sequence
  CasX Variant
QEIKRINKIRRRLVKDSNTKKAGKTRGPMKTLLVRVMTPDLRERLENLRKKPENIPQPISNTSRANLNKLLTDYTEMKKAILHVYWEEFQKDPVGLMSRVAQPASKKIDQNKLKPEMDEKGNLTTAGFACSQCGQPLFVYKLEQVSEKGKAYTNYFGRCNVAEHEKLIKLAQLKPEKDSDEAVTYSLGKFGQRALDFYSIHVTKESTHPVKPLAQIAGNRYASSPVGKALSGACMGTIASFLSKYQDIIIEHQKVVKGNQKRLESLRELAGKENLEYPSVTLPPQPHTKEGVDAYNEVIARVRMWVNLNLWQKLKLSRDDAKPLLRLKGFPSFPLVERQANEVDWWDMVCNVKKLINEKKEDGKVFWQNLAGYKRQEALRPYLSSEEDRKKGKKFARYQLGDLLLHLEKKHGEDWGKVYDEAWERIDKKVEGLSKHIKLEEERRSEDAQSKAALTDWLRAKASFVIEGLKEADKDEFCRCELKLQKWYGDLRGKPFAIEAENSILDISGFSKQYNCAFIWQKDGVKKLNLYLIINYFKGGKLRFKKIKPEAFEANRFYTVINKKSGEIVPMEVNFNFDDPNLIILPLAFGKRQGREFIWNDLLSLETGSLKLANGRVIEKTLYNRRTRQDEPALFVALTFERREVLDSSNIKPMNLIGVDRGENIPAVIALTDPEGCPLSRFKDSLGNPTHILRIGESYKEKQRTIQAKKEVEQRRAGGYSRKYASKAKNLADDMVRNTARDLLYYAVTQDAMLIFENLSRGFGRQGKRTFMAERQYTRMEDWLTAKLAYEGLPSKTYLSKTLAQYTSKTCSNCGFTITSADYDRVLEKLKKTATGWMTTINGKELKVEGQITYYNRYKRQNVVKDLSVELDRLSEESVNNDISSWTKGRSGEALSLLKKRFSHRPVQEKFVCLNCGFETHADEQAALNIARSWLFLRSQEYKKYQTNKTTGNTDKRAFVETWQSFYRKKLKEVWKPAV

SEQ ID NO: 43806 - protein, 978 aa, Artificial Sequence
  CasX Variant
QEIKRINKIRRRLVKDSNTKKAGKTGPMKTLLVRVMTPDLRERLENLRKKPENIPQPISNTSRANLNKLLTDYTEMKKAILHVYWEEFQKDPVGLMSRVAQPASKKIDQNKLKPEMDEKGNLTTAGFACSQCGQPLFVYKLEQVSEKGKAYTNYFGRCNVAEHEKLILLAQLKPEKDSDEAVTYSLGKFGQRALDFYSIHVTKESTHPVKPLAQIAGNRYASYPVGKALSGACMGTIASFLSKYQDIIIEHQKVVKGNQKRLESLRELAGKENLEYPSVTLPPQPHTKEGVDAYNEVIARVRMWVNLNLWQKLKLSRDDAKPLLRLKGFPSFPLVERQANEVDWWDMVCNVKKLINEKKEDGKVFWQNLAGYKRQEALRPYLSSEEDRKKGKKFARYQLGDLLLHLEKKHGEDWGKVYDEAWERIDKKVEGLSKHIKLEEERRSEDAQSKAALTDWLRAKASFVIEGLKEADKDEFCRCELKLQKWYGDLRGKPFAIEAENSILDISGFSKQYNCAFIWQKDGVKKLNLYLIINYFKGGKLRFKKIKPEAFEANRFYTVINKKSGEIVPMEVNFNFDDPNLIILPLAFGKRQGREFIWNDLLSLETGSLKLANGRVIEKTLYNRRTRQDEPALFVALTFERREVLDSSNIKPMNLIGVDRGENIPAVIALTDPEGCPLSRFKDSLGNPTHILRIGESYKEKQRTIQAKKEVEQRRAGGYSRKYASKAKNLADDMVRNTARDLLYYAVTQDAMLIFENLSRGFGRQGKRTFMAERQYTRMEDWLTAKLAYEGLPSKTYLSKTLAQYTSKTCSNCGFTITSADYDRVLEKLKKTATGWMTTINGKELKVEGQITYYNRYKRQNVVKDLSVELDRLSEESVNNDISSWTKGRSGEALSLLKKRFSHRPVQEKFVCLNCGFETHADEQAALNIARSWLFLRSQEYKKYQTNKTTGNTDKRAFVETWQSFYRKKLKEVWKPAV

SEQ ID NO: 43807 - protein, 978 aa, Artificial Sequence
  CasX Variant
QEIKRINKIRRRLVKDSNTKKAGKTGPMKTLLVRVMTPDLRERLENLRKKPENIPQPISNTSRANLNKLLTDYTEMKKAILHVYWEEFQKDPVGLMSRVAQPASKKIDQNKLKPEMDEKGNLTTAGFACSQCGQPLFVYKLEQVSEKGKAYTNYFGRCNVAEHEKLILLAQLKPEKDSDEAVTYSLGKFGQRALDFYSIHVTKESTHPVKPLAQIAGNRYASHPVGKALSGACMGTIASFLSKYQDIIIEHQKVVKGNQKRLESLRELAGKENLEYPSVTLPPQPHTKEGVDAYNEVIARVRMWVNLNLWQKLKLSRDDAKPLLRLKGFPSFPLVERQANEVDWWDMVCNVKKLINEKKEDGKVFWQNLAGYKRQEALRPYLSSEEDRKKGKKFARYQLGDLLLHLEKKHGEDWGKVYDEAWERIDKKVEGLSKHIKLEEERRSEDAQSKAALTDWLRAKASFVIEGLKEADKDEFCRCELKLQKWYGDLRGKPFAIEAENSILDISGFSKQYNCAFIWQKDGVKKLNLYLIINYFKGGKLRFKKIKPEAFEANRFYTVINKKSGEIVPMEVNFNFDDPNLIILPLAFGKRQGREFIWNDLLSLETGSLKLANGRVIEKTLYNRRTRQDEPALFVALTFERREVLDSSNIKPMNLIGVDRGENIPAVIALTDPEGCPLSRFKDSLGNPTHILRIGESYKEKQRTIQAKKEVEQRRAGGYSRKYASKAKNLADDMVRNTARDLLYYAVTQDAMLIFENLSRGFGRQGKRTFMAERQYTRMEDWLTAKLAYEGLPSKTYLSKTLAQYTSKTCSNCGFTITSADYDRVLEKLKKTATGWMTTINGKELKVEGQITYYNRYKRQNVVKDLSVELDRLSEESVNNDISSWTKGRSGEALSLLKKRFSHRPVQEKFVCLNCGFETHADEQAALNIARSWLFLRSQEYKKYQTNKTTGNTDKRAFVETWQSFYRKKLKEVWKPAV

SEQ ID NO: 43808 - protein, 979 aa, Artificial Sequence
  CasX Variant
QEIKRINKIRRRLVKDSNTKKAGKTRGPMKTLLVRVMTPDLRERLENLRKKPENIPQPISNTSRANLNKLLTDYTEMKKAILHVYWEEFQKDPVGLMSRVAQPASKKIDQNKLKPEMDEKGNLTTAGFACSQCGQPLFVYKLEQVSEKGKAYTNYFGRCNVAEHEKLILLAQLKPEKDSDEAVTYSLGKFGQRALDFYSIHVTKESTHPVKPLAQIAGNRYASYPVGKALSGACMGTIASFLSKYQDIIIEHQKVVKGNQKRLESLRELAGKENLEYPSVTLPPQPHTKEGVDAYNEVIARVRMWVNLNLWQKLKLSRDDAKPLLRLKGFPSFPLVERQANEVDWWDMVCNVKKLINEKKEDGKVFWQNLAGYKRQEALRPYLSSEEDRKKGKKFARYQLGDLLLHLEKKHGEDWGKVYDEAWERIDKKVEGLSKHIKLEEERRSEDAQSKAALTDWLRAKASFVIEGLKEADKDEFCRCELKLQKWYGDLRGKPFAIEAENSILDISGFSKQYNCAFIWQKDGVKKLNLYLIINYFKGGKLRFKKIKPEAFEANRFYTVINKKSGEIVPMEVNFNFDDPNLIILPLAFGKRQGREFIWNDLLSLETGSLKLANGRVIEKTLYNRRTRQDEPALFVALTFERREVLDSSNIKPMNLIGVDRGENIPAVIALTDPEGCPLSRFKDSLGNPTHILRIGESYKEKQRTIQAKKEVEQRRAGGYSRKYASKAKNLADDMVRNTARDLLYYAVTQDAMLIFENLSRGFGRQGKRTFMAERQYTRMEDWLTAKLAYEGLPSKTYLSKTLAQYTSKTCSNCGFTITSADYDRVLEKLKKTATGWMTTINGKELKVEGQITYYNRYKRQNVVKDLSVELDRLSEESVNNDISSWTKGRSGEALSLLKKRFSHRPVQEKFVCLNCGFETHADEQAALNIARSWLFLRSQEYKKYQTNKTTGNTDKRAFVETWQSFYRKKLKEVWKPAV

SEQ ID NO: 43809 - protein, 979 aa, Artificial Sequence
  CasX Variant
QEIKRINKIRRRLVKDSNTKKAGKTRGPMKTLLVRVMTPDLRERLENLRKKPENIPQPISNTSRANLNKLLTDYTEMKKAILHVYWEEFQKDPVGLMSRVAQPASKKIDQNKLKPEMDEKGNLTTAGFACSQCGQPLFVYKLEQVSEKGKAYTNYFGRCNVAEHEKLILLAQLKPEKDSDEAVTYSLGKFGQRALDFYSIHVTKESTHPVKPLAQIAGNRYASHPVGKALSGACMGTIASFLSKYQDIIIEHQKVVKGNQKRLESLRELAGKENLEYPSVTLPPQPHTKEGVDAYNEVIARVRMWVNLNLWQKLKLSRDDAKPLLRLKGFPSFPLVERQANEVDWWDMVCNVKKLINEKKEDGKVFWQNLAGYKRQEALRPYLSSEEDRKKGKKFARYQLGDLLLHLEKKHGEDWGKVYDEAWERIDKKVEGLSKHIKLEEERRSEDAQSKAALTDWLRAKASFVIEGLKEADKDEFCRCELKLQKWYGDLRGKPFAIEAENSILDISGFSKQYNCAFIWQKDGVKKLNLYLIINYFKGGKLRFKKIKPEAFEANRFYTVINKKSGEIVPMEVNFNFDDPNLIILPLAFGKRQGREFIWNDLLSLETGSLKLANGRVIEKTLYNRRTRQDEPALFVALTFERREVLDSSNIKPMNLIGVDRGENIPAVIALTDPEGCPLSRFKDSLGNPTHILRIGESYKEKQRTIQAKKEVEQRRAGGYSRKYASKAKNLADDMVRNTARDLLYYAVTQDAMLIFENLSRGFGRQGKRTFMAERQYTRMEDWLTAKLAYEGLPSKTYLSKTLAQYTSKTCSNCGFTITSADYDRVLEKLKKTATGWMTTINGKELKVEGQITYYNRYKRQNVVKDLSVELDRLSEESVNNDISSWTKGRSGEALSLLKKRFSHRPVQEKFVCLNCGFETHADEQAALNIARSWLFLRSQEYKKYQTNKTTGNTDKRAFVETWQSFYRKKLKEVWKPAV

SEQ ID NO: 43810 - protein, 978 aa, Artificial Sequence
  CasX Variant
QEIKRINKIRRRLVKDSNTKKAGKTGPMKTLLVRVMTPDLRERLENLRKKPENIPQPISNTSRANLNKLLTDYTEMKKAILHVYWEEFQKDPVGLMSRVAQPASKKIDQNKLKPEMDEKGNLTTAGFACSQCGQPLFVYKLEQVSEKGKAYTNYFGRCNVAEHEKLIKLAQLKPEKDSDEAVTYSLGKFGQRALDFYSIHVTKESTHPVKPLAQIAGNRYASGPVGKALSGACMGTIASFLSKYQDIIIEHQKVVKGNQKRLESLRELAGKENLEYPSVTLPPQPHTKEGVDAYNEVIARVRMWVNLNLWQKLKLSRDDAKPLLRLKGFPSFPLVERQANEVDWWDMVCNVKKLINEKKEDGKVFWQNLAGYKRQEALRPYLSSEEDRKKGKKFARYQLGDLLLHLEKKHGEDWGKVYDEAWERIDKKVEGLSKHIKLEEERRSEDAQSKAALTDWLRAKASFVIEGLKEADKDEFCRCELKLQKWYGDLRGKPFAIEAENSILDISGFSKQYNCAFIWQKDGVKKLNLYLIINYFKGGKLRFKKIKPEAFEANRFYTVINKKSGEIVPMEVNFNFDDPNLIILPLAFGKRQGREFIWNDLLSLETGSLKLANGRVIEKTLYNRRTRQDEPALFVALTFERREVLDSSNIKPMNLIGVDRGENIPAVIALTDPEGCPLSRFKDSLGNPTHILRIGESYKEKQRTIQAKKEVEQRRAGGYSRKYASKAKNLADDMVRNTARDLLYYAVTQDAMLIFENLSRGFGRQGKRTFMAERQYTRMEDWLTAKLAYEGLPSKTYLSKTLAQYTSKTCSNCGFTITSADYDRVLEKLKKTATGWMTTINGKELKVEGQITYYNRYKRQNVVKDLSVELDRLSEESVNNDISSWTKGRSGEALSLLKKRFSHRPVQEKFVCLNCGFETHADEQAALNIARSWLFLRSQEYKKYQTNKTTGNTDKRAFVETWQSFYRKKLKEVWKPAV

SEQ ID NO: 43811 - protein, 978 aa, Artificial Sequence
  CasX Variant
QEIKRINKIRRRLVKDSNTKKAGKTGPMKTLLVRVMTPDLRERLENLRKKPENIPQPISNTSRANLNKLLTDYTEMKKAILHVYWEEFQKDPVGLMSRVAQPASKKIDQNKLKPEMDEKGNLTTAGFACSQCGQPLFVYKLEQVSEKGKAYTNYFGRCNVAEHEKLIKLAQLKPEKDSDEAVTYSLGKFGQRALDFYSIHVTKESTHPVKPLAQIAGNRYASYPVGKALSGACMGTIASFLSKYQDIIIEHQKVVKGNQKRLESLRELAGKENLEYPSVTLPPQPHTKEGVDAYNEVIARVRMWVNLNLWQKLKLSRDDAKPLLRLKGFPSFPLVERQANEVDWWDMVCNVKKLINEKKEDGKVFWQNLAGYKRQEALRPYLSSEEDRKKGKKFARYQLGDLLLHLEKKHGEDWGKVYDEAWERIDKKVEGLSKHIKLEEERRSEDAQSKAALTDWLRAKASFVIEGLKEADKDEFCRCELKLQKWYGDLRGKPFAIEAENSILDISGFSKQYNCAFIWQKDGVKKLNLYLIINYFKGGKLRFKKIKPEAFEANRFYTVINKKSGEIVPMEVNFNFDDPNLIILPLAFGKRQGREFIWNDLLSLETGSLKLANGRVIEKTLYNRRTRQDEPALFVALTFERREVLDSSNIKPMNLIGVDRGENIPAVIALTDPEGCPLSRFKDSLGNPTHILRIGESYKEKQRTIQAKKEVEQRRAGGYSRKYASKAKNLADDMVRNTARDLLYYAVTQDAMLIFENLSRGFGRQGKRTFMAERQYTRMEDWLTAKLAYEGLPSKTYLSKTLAQYTSKTCSNCGFTITSADYDRVLEKLKKTATGWMTTINGKELKVEGQITYYNRYKRQNVVKDLSVELDRLSEESVNNDISSWTKGRSGEALSLLKKRFSHRPVQEKFVCLNCGFETHADEQAALNIARSWLFLRSQEYKKYQTNKTTGNTDKRAFVETWQSFYRKKLKEVWKPAV

SEQ ID NO: 43812 - protein, 979 aa, Artificial Sequence
  CasX Variant
QEIKRINKIRRRLVKDSNTKKAGKTRGPMKTLLVRVMTPDLRERLENLRKKPENIPQPISNTSRANLNKLLTDYTEMKKAILHVYWEEFQKDPVGLMSRVAQPASKKIDQNKLKPEMDEKGNLTTAGFACSQCGQPLFVYKLEQVSEKGKAYTNYFGRCNVAEHEKLIKLAQLKPEKDSDEAVTYSLGKFGQRALDFYSIHVTKESTHPVKPLAQIAGNRYASGPVGKALSGACMGTIASFLSKYQDIIIEHQKVVKGNQKRLESLRELAGKENLEYPSVTLPPQPHTKEGVDAYNEVIARVRMWVNLNLWQKLKLSRDDAKPLLRLKGFPSFPLVERQANEVDWWDMVCNVKKLINEKKEDGKVFWQNLAGYKRQEALRPYLSSEEDRKKGKKFARYQLGDLLLHLEKKHGEDWGKVYDEAWERIDKKVEGLSKHIKLEEERRSEDAQSKAALTDWLRAKASFVIEGLKEADKDEFCRCELKLQKWYGDLRGKPFAIEAENSILDISGFSKQYNCAFIWQKDGVKKLNLYLIINYFKGGKLRFKKIKPEAFEANRFYTVINKKSGEIVPMEVNFNFDDPNLIILPLAFGKRQGREFIWNDLLSLETGSLKLANGRVIEKTLYNRRTRQDEPALFVALTFERREVLDSSNIKPMNLIGVDRGENIPAVIALTDPEGCPLSRFKDSLGNPTHILRIGESYKEKQRTIQAKKEVEQRRAGGYSRKYASKAKNLADDMVRNTARDLLYYAVTQDAMLIFENLSRGFGRQGKRTFMAERQYTRMEDWLTAKLAYEGLPSKTYLSKTLAQYTSKTCSNCGFTITSADYDRVLEKLKKTATGWMTTINGKELKVEGQITYYNRYKRQNVVKDLSVELDRLSEESVNNDISSWTKGRSGEALSLLKKRFSHRPVQEKFVCLNCGFETHADEQAALNIARSWLFLRSQEYKKYQTNKTTGNTDKRAFVETWQSFYRKKLKEVWKPAV

SEQ ID NO: 43813 - protein, 979 aa, Artificial Sequence
  CasX Variant
QEIKRINKIRRRLVKDSNTKKAGKTRGPMKTLLVRVMTPDLRERLENLRKKPENIPQPISNTSRANLNKLLTDYTEMKKAILHVYWEEFQKDPVGLMSRVAQPASKKIDQNKLKPEMDEKGNLTTAGFACSQCGQPLFVYKLEQVSEKGKAYTNYFGRCNVAEHEKLIKLAQLKPEKDSDEAVTYSLGKFGQRALDFYSIHVTKESTHPVKPLAQIAGNRYASYPVGKALSGACMGTIASFLSKYQDIIIEHQKVVKGNQKRLESLRELAGKENLEYPSVTLPPQPHTKEGVDAYNEVIARVRMWVNLNLWQKLKLSRDDAKPLLRLKGFPSFPLVERQANEVDWWDMVCNVKKLINEKKEDGKVFWQNLAGYKRQEALRPYLSSEEDRKKGKKFARYQLGDLLLHLEKKHGEDWGKVYDEAWERIDKKVEGLSKHIKLEEERRSEDAQSKAALTDWLRAKASFVIEGLKEADKDEFCRCELKLQKWYGDLRGKPFAIEAENSILDISGFSKQYNCAFIWQKDGVKKLNLYLIINYFKGGKLRFKKIKPEAFEANRFYTVINKKSGEIVPMEVNFNFDDPNLIILPLAFGKRQGREFIWNDLLSLETGSLKLANGRVIEKTLYNRRTRQDEPALFVALTFERREVLDSSNIKPMNLIGVDRGENIPAVIALTDPEGCPLSRFKDSLGNPTHILRIGESYKEKQRTIQAKKEVEQRRAGGYSRKYASKAKNLADDMVRNTARDLLYYAVTQDAMLIFENLSRGFGRQGKRTFMAERQYTRMEDWLTAKLAYEGLPSKTYLSKTLAQYTSKTCSNCGFTITSADYDRVLEKLKKTATGWMTTINGKELKVEGQITYYNRYKRQNVVKDLSVELDRLSEESVNNDISSWTKGRSGEALSLLKKRFSHRPVQEKFVCLNCGFETHADEQAALNIARSWLFLRSQEYKKYQTNKTTGNTDKRAFVETWQSFYRKKLKEVWKPAV

SEQ ID NO: 43814 - protein, 979 aa, Artificial Sequence
  CasX Variant
QEIKRINKIRRRLVKDSNTKKAGKTRGPMKTLLVRVMTPDLRERLENLRKKPENIPQPISNTSRANLNKLLTDYTEMKKAILHVYWEEFQKDPVGLMSRVAQPASKKIDQNKLKPEMDEKGNLTTAGFACSQCGQPLFVYKLEQVSEKGKAYTNYFGRCNVAEHEKLIKLAQLKPEKDSDEAVTYSLGKFGQRALDFYSIHVTKESTHPVKPLAQIAGNRYASHPVGKALSGACMGTIASFLSKYQDIIIEHQKVVKGNQKRLESLRELAGKENLEYPSVTLPPQPHTKEGVDAYNEVIARVRMWVNLNLWQKLKLSRDDAKPLLRLKGFPSFPLVERQANEVDWWDMVCNVKKLINEKKEDGKVFWQNLAGYKRQEALRPYLSSEEDRKKGKKFARYQLGDLLLHLEKKHGEDWGKVYDEAWERIDKKVEGLSKHIKLEEERRSEDAQSKAALTDWLRAKASFVIEGLKEADKDEFCRCELKLQKWYGDLRGKPFAIEAENSILDISGFSKQYNCAFIWQKDGVKKLNLYLIINYFKGGKLRFKKIKPEAFEANRFYTVINKKSGEIVPMEVNFNFDDPNLIILPLAFGKRQGREFIWNDLLSLETGSLKLANGRVIEKTLYNRRTRQDEPALFVALTFERREVLDSSNIKPMNLIGVDRGENIPAVIALTDPEGCPLSRFKDSLGNPTHILRIGESYKEKQRTIQAKKEVEQRRAGGYSRKYASKAKNLADDMVRNTARDLLYYAVTQDAMLIFENLSRGFGRQGKRTFMAERQYTRMEDWLTAKLAYEGLPSKTYLSKTLAQYTSKTCSNCGFTITSADYDRVLEKLKKTATGWMTTINGKELKVEGQITYYNRYKRQNVVKDLSVELDRLSEESVNNDISSWTKGRSGEALSLLKKRFSHRPVQEKFVCLNCGFETHADEQAALNIARSWLFLRSQEYKKYQTNKTTGNTDKRAFVETWQSFYRKKLKEVWKPAV

SEQ ID NO: 43815 - protein, 979 aa, Artificial Sequence; identical to SEQ ID NO: 43663
  CasX Variant

SEQ ID NO: 43816 - protein, 979 aa, Artificial Sequence
  CasX Variant
QEIKRINKIRRRLVKDSNTKKAGKTRGPMKTLLVRVMTPDLRERLENLRKKPENIPQPISNTSRANLNKLLTDYTEMKKAILHVYWEEFQKDPVGLMSRVAQPASKKIDQNKLKPEMDEKGNLTTAGFACSQCGQPLFVYKLEQVSEKGKAYTNYFGRCNVAEHEKLILLAQLKPEKDSDEAVTYSLGKFGQRALDFYSIHVTKESTHPVKPLAQIAGNRYASHPVGKALSDACMGTIASFLSKYQDIIIEHQKVVKGNQKRLESLRELAGKENLEYPSVTLPPQPHTKEGVDAYNEVIARVRMWVNLNLWQKLKLSRDDAKPLLRLKGFPSFPLVERQANEVDWWDMVCNVKKLINEKKEDGKVFWQNLAGYKRQEALRPYLSSEEDRKKGKKFARYQLGDLLLHLEKKHGEDWGKVYDEAWERIDKKVEGLSKHIKLEEERRSEDAQSKAALTDWLRAKASFVIEGLKEADKDEFCRCELKLQKWYGDLRGKPFAIEAENSILDISGFSKQYNCAFIWQKDGVKKLNLYLIINYFKGGKLRFKKIKPEAFEANRFYTVINKKSGEIVPMEVNFNFDDPNLIILPLAFGKRQGREFIWNDLLSLETGSLKLANGRVIEKTLYNRRTRQDEPALFVALTFERREVLDSSNIKPMNLIGVDRGENIPAVIALTDPEGCPLSRFKDSLGNPTHILRIGESYKEKQRTIQAKKEVEQRRAGGYSRKYASKAKNLADDMVRNTARDLLYYAVTQDAMLIFENLSRGFGRQGKRTFMAERQYTRMEDWLTAKLAYEGLPSKTYLSKTLAQYTSKTCSNCGFTITSADYDRVLEKLKKTATGWMTTINGKELKVEGQITYYNRYKRQNVVKDLSVELDRLSEESVNNDISSWTKGRSGEALSLLKKRFSHRPVQEKFVCLNCGFETHADEQAALNIARSWLFLRSQEYKKYQTNKTTGNTDKRAFVETWQSFYRKKLKEVWKPAV

SEQ ID NO: 43817 - protein, 978 aa, Artificial Sequence; identical to SEQ ID NO: 43712
  CasX Variant

SEQ ID NO: 43818 - protein, 978 aa, Artificial Sequence
  CasX Variant
QEIKRINKIRRRLVKDSNTKKAGKTGPMKTLLVRVMTPDLRERLENLRKKPENIPQPISNTSRANLNKLLTDYTEMKKAILHVYWEEFQKDPVGLMSRVAQPASKKIDQNKLKPEMDEKGNLTTAGFACSQCGQPLFVYKLEQVSEKGKAYTNYFGRCNVAEHEKLIKLAQLKPEKDSDEAVTYSLGKFGQRALDFYSIHVTKESTHPVKPLAQIAGNRYASYPVGKALSDACMGTIASFLSKYQDIIIEHQKVVKGNQKRLESLRELAGKENLEYPSVTLPPQPHTKEGVDAYNEVIARVRMWVNLNLWQKLKLSRDDAKPLLRLKGFPSFPLVERQANEVDWWDMVCNVKKLINEKKEDGKVFWQNLAGYKRQEALRPYLSSEEDRKKGKKFARYQLGDLLLHLEKKHGEDWGKVYDEAWERIDKKVEGLSKHIKLEEERRSEDAQSKAALTDWLRAKASFVIEGLKEADKDEFCRCELKLQKWYGDLRGKPFAIEAENSILDISGFSKQYNCAFIWQKDGVKKLNLYLIINYFKGGKLRFKKIKPEAFEANRFYTVINKKSGEIVPMEVNFNFDDPNLIILPLAFGKRQGREFIWNDLLSLETGSLKLANGRVIEKTLYNRRTRQDEPALFVALTFERREVLDSSNIKPMNLIGVDRGENIPAVIALTDPEGCPLSRFKDSLGNPTHILRIGESYKEKQRTIQAKKEVEQRRAGGYSRKYASKAKNLADDMVRNTARDLLYYAVTQDAMLIFENLSRGFGRQGKRTFMAERQYTRMEDWLTAKLAYEGLPSKTYLSKTLAQYTSKTCSNCGFTITSADYDRVLEKLKKTATGWMTTINGKELKVEGQITYYNRYKRQNVVKDLSVELDRLSEESVNNDISSWTKGRSGEALSLLKKRFSHRPVQEKFVCLNCGFETHADEQAALNIARSWLFLRSQEYKKYQTNKTTGNTDKRAFVETWQSFYRKKLKEVWKPAV

SEQ ID NO: 43819 - protein, 978 aa, Artificial Sequence
  CasX Variant
QEIKRINKIRRRLVKDSNTKKAGKTGPMKTLLVRVMTPDLRERLENLRKKPENIPQPISNTSRANLNKLLTDYTEMKKAILHVYWEEFQKDPVGLMSRVAQPASKKIDQNKLKPEMDEKGNLTTAGFACSQCGQPLFVYKLEQVSEKGKAYTNYFGRCNVAEHEKLIKLAQLKPEKDSDEAVTYSLGKFGQRALDFYSIHVTKESTHPVKPLAQIAGNRYASHPVGKALSDACMGTIASFLSKYQDIIIEHQKVVKGNQKRLESLRELAGKENLEYPSVTLPPQPHTKEGVDAYNEVIARVRMWVNLNLWQKLKLSRDDAKPLLRLKGFPSFPLVERQANEVDWWDMVCNVKKLINEKKEDGKVFWQNLAGYKRQEALRPYLSSEEDRKKGKKFARYQLGDLLLHLEKKHGEDWGKVYDEAWERIDKKVEGLSKHIKLEEERRSEDAQSKAALTDWLRAKASFVIEGLKEADKDEFCRCELKLQKWYGDLRGKPFAIEAENSILDISGFSKQYNCAFIWQKDGVKKLNLYLIINYFKGGKLRFKKIKPEAFEANRFYTVINKKSGEIVPMEVNFNFDDPNLIILPLAFGKRQGREFIWNDLLSLETGSLKLANGRVIEKTLYNRRTRQDEPALFVALTFERREVLDSSNIKPMNLIGVDRGENIPAVIALTDPEGCPLSRFKDSLGNPTHILRIGESYKEKQRTIQAKKEVEQRRAGGYSRKYASKAKNLADDMVRNTARDLLYYAVTQDAMLIFENLSRGFGRQGKRTFMAERQYTRMEDWLTAKLAYEGLPSKTYLSKTLAQYTSKTCSNCGFTITSADYDRVLEKLKKTATGWMTTINGKELKVEGQITYYNRYKRQNVVKDLSVELDRLSEESVNNDISSWTKGRSGEALSLLKKRFSHRPVQEKFVCLNCGFETHADEQAALNIARSWLFLRSQEYKKYQTNKTTGNTDKRAFVETWQSFYRKKLKEVWKPAV

SEQ ID NO: 43820 - protein, 979 aa, Artificial Sequence
  CasX Variant
QEIKRINKIRRRLVKDSNTKKAGKTRGPMKTLLVRVMTPDLRERLENLRKKPENIPQPISNTSRANLNKLLTDYTEMKKAILHVYWEEFQKDPVGLMSRVAQPASKKIDQNKLKPEMDEKGNLTTAGFACSQCGQPLFVYKLEQVSEKGKAYTNYFGRCNVAEHEKLIKLAQLKPEKDSDEAVTYSLGKFGQRALDFYSIHVTKESTHPVKPLAQIAGNRYASYPVGKALSDACMGTIASFLSKYQDIIIEHQKVVKGNQKRLESLRELAGKENLEYPSVTLPPQPHTKEGVDAYNEVIARVRMWVNLNLWQKLKLSRDDAKPLLRLKGFPSFPLVERQANEVDWWDMVCNVKKLINEKKEDGKVFWQNLAGYKRQEALRPYLSSEEDRKKGKKFARYQLGDLLLHLEKKHGEDWGKVYDEAWERIDKKVEGLSKHIKLEEERRSEDAQSKAALTDWLRAKASFVIEGLKEADKDEFCRCELKLQKWYGDLRGKPFAIEAENSILDISGFSKQYNCAFIWQKDGVKKLNLYLIINYFKGGKLRFKKIKPEAFEANRFYTVINKKSGEIVPMEVNFNFDDPNLIILPLAFGKRQGREFIWNDLLSLETGSLKLANGRVIEKTLYNRRTRQDEPALFVALTFERREVLDSSNIKPMNLIGVDRGENIPAVIALTDPEGCPLSRFKDSLGNPTHILRIGESYKEKQRTIQAKKEVEQRRAGGYSRKYASKAKNLADDMVRNTARDLLYYAVTQDAMLIFENLSRGFGRQGKRTFMAERQYTRMEDWLTAKLAYEGLPSKTYLSKTLAQYTSKTCSNCGFTITSADYDRVLEKLKKTATGWMTTINGKELKVEGQITYYNRYKRQNVVKDLSVELDRLSEESVNNDISSWTKGRSGEALSLLKKRFSHRPVQEKFVCLNCGFETHADEQAALNIARSWLFLRSQEYKKYQTNKTTGNTDKRAFVETWQSFYRKKLKEVWKPAV

SEQ ID NO: 43821 - protein, 979 aa, Artificial Sequence
  CasX Variant
QEIKRINKIRRRLVKDSNTKKAGKTRGPMKTLLVRVMTPDLRERLENLRKKPENIPQPISNTSRANLNKLLTDYTEMKKAILHVYWEEFQKDPVGLMSRVAQPASKKIDQNKLKPEMDEKGNLTTAGFACSQCGQPLFVYKLEQVSEKGKAYTNYFGRCNVAEHEKLIKLAQLKPEKDSDEAVTYSLGKFGQRALDFYSIHVTKESTHPVKPLAQIAGNRYASHPVGKALSDACMGTIASFLSKYQDIIIEHQKVVKGNQKRLESLRELAGKENLEYPSVTLPPQPHTKEGVDAYNEVIARVRMWVNLNLWQKLKLSRDDAKPLLRLKGFPSFPLVERQANEVDWWDMVCNVKKLINEKKEDGKVFWQNLAGYKRQEALRPYLSSEEDRKKGKKFARYQLGDLLLHLEKKHGEDWGKVYDEAWERIDKKVEGLSKHIKLEEERRSEDAQSKAALTDWLRAKASFVIEGLKEADKDEFCRCELKLQKWYGDLRGKPFAIEAENSILDISGFSKQYNCAFIWQKDGVKKLNLYLIINYFKGGKLRFKKIKPEAFEANRFYTVINKKSGEIVPMEVNFNFDDPNLIILPLAFGKRQGREFIWNDLLSLETGSLKLANGRVIEKTLYNRRTRQDEPALFVALTFERREVLDSSNIKPMNLIGVDRGENIPAVIALTDPEGCPLSRFKDSLGNPTHILRIGESYKEKQRTIQAKKEVEQRRAGGYSRKYASKAKNLADDMVRNTARDLLYYAVTQDAMLIFENLSRGFGRQGKRTFMAERQYTRMEDWLTAKLAYEGLPSKTYLSKTLAQYTSKTCSNCGFTITSADYDRVLEKLKKTATGWMTTINGKELKVEGQITYYNRYKRQNVVKDLSVELDRLSEESVNNDISSWTKGRSGEALSLLKKRFSHRPVQEKFVCLNCGFETHADEQAALNIARSWLFLRSQEYKKYQTNKTTGNTDKRAFVETWQSFYRKKLKEVWKPAV

SEQ ID NO: 43822 - protein, 978 aa, Artificial Sequence
  CasX Variant
QEIKRINKIRRRLVKDSNTKKAGKTGPMKTLLVRVMTPDLRERLENLRKKPENIPQPISNTSRANLNKLLTDYTEMKKAILHVYWEEFQKDPVGLMSRVAQPASKKIDQNKLKPEMDEKGNLTTAGFACSQCGQPLFVYKLEQVSEKGKAYTNYFGRCNVAEHEKLIKLAQLKPEKDSDEAVTYSLGKFGQRALDFYSIHVTKESTHPVKPLAQIAGNRYASHPVGKALSGACMGTIASFLSKYQDIIIEHQKVVKGNQKRLESLRELAGKENLEYPSVTLPPQPHTKEGVDAYNEVIARVRMWVNLNLWQKLKLSRDDAKPLLRLKGFPSFPLVERQANEVDWWDMVCNVKKLINEKKEDGKVFWQNLAGYKRQEALRPYLSSEEDRKKGKKFARYQLGDLLLHLEKKHGEDWGKVYDEAWERIDKKVEGLSKHIKLEEERRSEDAQSKAALTDWLRAKASFVIEGLKEADKDEFCRCELKLQKWYGDLRGKPFAIEAENSILDISGFSKQYNCAFIWQKDGVKKLNLYLIINYFKGGKLRFKKIKPEAFEANRFYTVINKKSGEIVPMEVNFNFDDPNLIILPLAFGKRQGREFIWNDLLSLETGSLKLANGRVIEKTLYNRRTRQDEPALFVALTFERREVLDSSNIKPMNLIGVDRGENIPAVIALTDPEGCPLSRFKDSLGNPTHILRIGESYKEKQRTIQAKKEVEQRRAGGYSRKYASKAKNLADDMVRNTARDLLYYAVTQDAMLIFENLSRGFGRQGKRTFMAERQYTRMEDWLTAKLAYEGLPSKTYLSKTLAQYTSKTCSNCGFTITSADYDRVLEKLKKTATGWMTTINGKELKVEGQITYYNRYKRQNVVKDLSVELDRLSEESVNNDISSWTKGRSGEALSLLKKRFSHRPVQEKFVCLNCGFETHADEQAALNIARSWLFLRSQEYKKYQTNKTTGNTDKRAFVETWQSFYRKKLKEVWKPAV

SEQ ID NO: 43823 - protein, 979 aa, Artificial Sequence
  CasX Variant
QEIKRINKIRRRLVKDSNTKKAGKTGPMKTLLVRVMTPDLRERLENLRKKPENIPQPISNTSRANLNKLLTDYTEMKKAILHVYWEEFQKDPVGLMSRVAQPASKKIDQNKLKPEMDEKGNLTTAGFACSQCGQPLFVYKLEQVSEKGKAYTNYFGRCNVAEHEKLILLAQLKPEKDSDEAVTYSLGKFGQRALDFYSIHVTKESTHPVKPLAQIAGNRYASGPVGKALSDACMGTIASFLSKYQDIIIEHQKVVKGNQKRLESLRELAGKENLEYPSVTLPPQPHTKEGVDAYNEVIARVRMWVNLNLWQKLKLSRDDAKPLLRLKGFPSFPLVERQANEVDWWDMVCNVKKLINEKKEDGKVFWQNLAGYKRQEALRPYLSSEEDRKKGKKFARYQLGDLLLHLEKKHGEDWGKVYDEAWERIDKKVEGLSKHIKLEEERRSEDAQSKAALTDWLRAKASFVIEGLKEADKDEFCRCELKLQKWYGDLRGKPFAIEAENSILDISGFSKQYNCAFIWQKDGVKKLNLYLIINYFKGGKLRFKKIKPEAFEANRFYTVINKKSGEIVPMEVNFNFDDPNLIILPLAFGKRQGREFIWNDLLSLETGSLKLANGRVIEKTLYNARRTRQDEPALFVALTFERREVLDSSNIKPMNLIGVDRGENIPAVIALTDPEGCPLSRFKDSLGNPTHILRIGESYKEKQRTIQAKKEVEQRRAGGYSRKYASKAKNLADDMVRNTARDLLYYAVTQDAMLIFENLSRGFGRQGKRTFMAERQYTRMEDWLTAKLAYEGLPSKTYLSKTLAQYTSKTCSNCGFTITSADYDRVLEKLKKTATGWMTTINGKELKVEGQITYYNRYKRQNVVKDLSVELDRLSEESVNNDISSWTKGRSGEALSLLKKRFSHRPVQEKFVCLNCGFETHADEQAALNIARSWLFLRSQEYKKYQTNKTTGNTDKRAFVETWQSFYRKKLKEVWKPAV

SEQ ID NO: 43824 - protein, 978 aa, Artificial Sequence
  CasX Variant
QEIKRINKIRRRLVKDSNTKKAGKTGPMKTLLVRVMTPDLRERLENLRKKPENIPQPISNTSRANLNKLLTDYTEMKKAILHVYWEEFQVDPVGLMSRVAQPASKKIDQNKLKPEMDEKGNLTTAGFACSQCGQPLFVYKLEQVSEKGKAYTNYFGRCNVAEHEKLILLAQLKPEKDSDEAVTYSLGKFGQRALDFYSIHVTKESTHPVKPLAQIAGNRYASGPVGKALSDACMGTIASFLSKYQDIIIEHQKVVKGNQKRLESLRELAGKENLEYPSVTLPPQPHTKEGVDAYNEVIARVRMWVNLNLWQKLKLSRDDAKPLLRLKGFPSFPLVERQANEVDWWDMVCNVKKLINEKKEDGKVFWQNLAGYKRQEALRPYLSSEEDRKKGKKFARYQLGDLLLHLEKKHGEDWGKVYDEAWERIDKKVEGLSKHIKLEEERRSEDAQSKAALTDWLRAKASFVIEGLKEADKDEFCRCELKLQKWYGDLRGKPFAIEAENSILDISGFSKQYNCAFIWQKDGVKKLNLYLIINYFKGGKLRFKKIKPEAFEANRFYTVINKKSGEIVPMEVNFNFDDPNLIILPLAFGKRQGREFIWNDLLSLETGSLKLANGRVIEKTLYNRRTRQDEPALFVALTFERREVLDSSNIKPMNLIGVDRGENIPAVIALTDPEGCPLSRFKDSLGNPTHILRIGESYKEKQRTIQAKKEVEQRRAGGYSRKYASKAKNLADDMVRNTARDLLYYAVTQDAMLIFENLSRGFGRQGKRTFMAERQYTRMEDWLTAKLAYEGLPSKTYLSKTLAQYTSKTCSNCGFTITSADYDRVLEKLKKTATGWMTTINGKELKVEGQITYYNRYKRQNVVKDLSVELDRLSEESVNNDISSWTKGRSGEALSLLKKRFSHRPVQEKFVCLNCGFETHADEQAALNIARSWLFLRSQEYKKYQTNKTTGNTDKRAFVETWQSFYRKKLKEVWKPAV

SEQ ID NO: 43825 - protein, 979 aa, Artificial Sequence
  CasX Variant
QEIKRINKIRRRLVKDSNTKKAGKTGPMKTLLVRVMTPDLRERLENLRKKPENIPQPISNTSRANLNKLLTDYTEMKKAILHVYWEGEFQKDPVGLMSRVAQPASKKIDQNKLKPEMDEKGNLTTAGFACSQCGQPLFVYKLEQVSEKGKAYTNYFGRCNVAEHEKLILLAQLKPEKDSDEAVTYSLGKFGQRALDFYSIHVTKESTHPVKPLAQIAGNRYASGPVGKALSDACMGTIASFLSKYQDIIIEHQKVVKGNQKRLESLRELAGKENLEYPSVTLPPQPHTKEGVDAYNEVIARVRMWVNLNLWQKLKLSRDDAKPLLRLKGFPSFPLVERQANEVDWWDMVCNVKKLINEKKEDGKVFWQNLAGYKRQEALRPYLSSEEDRKKGKKFARYQLGDLLLHLEKKHGEDWGKVYDEAWERIDKKVEGLSKHIKLEEERRSEDAQSKAALTDWLRAKASFVIEGLKEADKDEFCRCELKLQKWYGDLRGKPFAIEAENSILDISGFSKQYNCAFIWQKDGVKKLNLYLIINYFKGGKLRFKKIKPEAFEANRFYTVINKKSGEIVPMEVNFNFDDPNLIILPLAFGKRQGREFIWNDLLSLETGSLKLANGRVIEKTLYNRRTRQDEPALFVALTFERREVLDSSNIKPMNLIGVDRGENIPAVIALTDPEGCPLSRFKDSLGNPTHILRIGESYKEKQRTIQAKKEVEQRRAGGYSRKYASKAKNLADDMVRNTARDLLYYAVTQDAMLIFENLSRGFGRQGKRTFMAERQYTRMEDWLTAKLAYEGLPSKTYLSKTLAQYTSKTCSNCGFTITSADYDRVLEKLKKTATGWMTTINGKELKVEGQITYYNRYKRQNVVKDLSVELDRLSEESVNNDISSWTKGRSGEALSLLKKRFSHRPVQEKFVCLNCGFETHADEQAALNIARSWLFLRSQEYKKYQTNKTTGNTDKRAFVETWQSFYRKKLKEVWKPAV

SEQ ID NO: 43826 - protein, 978 aa, Artificial Sequence
  CasX Variant
QEIKRINKIRRRLVKDSNTKKAGKTGPMKTLLVRVMTPDLRERLENLRKKPENIPQPISNTSRANLNKLLTDYTEMKKAILHVYWEEFQKDPVGLMSRVAQPASKKIDQNKLKPEMDEKGNLTTAGFACSQCGQPLFVYKLEQVSEKGKAYTNYFGRCNVAEHEKLILLAQLKPEKDSDEAVTYSLGKFGQRALDFYSIHVTKESTHPVKPLAQIAGNRYASGPVGKALSDACMGTIASFLSKYQDIIIEHQKVVKGNQKRLEHLRELAGKENLEYPSVTLPPQPHTKEGVDAYNEVIARVRMWVNLNLWQKLKLSRDDAKPLLRLKGFPSFPLVERQANEVDWWDMVCNVKKLINEKKEDGKVFWQNLAGYKRQEALRPYLSSEEDRKKGKKFARYQLGDLLLHLEKKHGEDWGKVYDEAWERIDKKVEGLSKHIKLEEERRSEDAQSKAALTDWLRAKASFVIEGLKEADKDEFCRCELKLQKWYGDLRGKPFAIEAENSILDISGFSKQYNCAFIWQKDGVKKLNLYLIINYFKGGKLRFKKIKPEAFEANRFYTVINKKSGEIVPMEVNFNFDDPNLIILPLAFGKRQGREFIWNDLLSLETGSLKLANGRVIEKTLYNRRTRQDEPALFVALTFERREVLDSSNIKPMNLIGVDRGENIPAVIALTDPEGCPLSRFKDSLGNPTHILRIGESYKEKQRTIQAKKEVEQRRAGGYSRKYASKAKNLADDMVRNTARDLLYYAVTQDAMLIFENLSRGFGRQGKRTFMAERQYTRMEDWLTAKLAYEGLPSKTYLSKTLAQYTSKTCSNCGFTITSADYDRVLEKLKKTATGWMTTINGKELKVEGQITYYNRYKRQNVVKDLSVELDRLSEESVNNDISSWTKGRSGEALSLLKKRFSHRPVQEKFVCLNCGFETHADEQAALNIARSWLFLRSQEYKKYQTNKTTGNTDKRAFVETWQSFYRKKLKEVWKPAV

SEQ ID NO: 43827 - protein, 979 aa, Artificial Sequence
  CasX Variant
QEIKRINKIRRRLVKDSNTKKAGKTGPMKTLLVRVMTPDLRERLENLRKKPENIPQPISNTSRANLNKLLTDYTEMKKAILHVYWEEFQKDPVGLMSRVAQPASKKIDQNKLKPEMDEKGNLTTAGFACSQCGQPLFVYKLEQVSEKGKAYTNYFGRCNVAEHEKLILLAQLKPEKDSDEAVTYSLGKFGQRALDFYSIHVTKESTHPVKPLAQICAGNRYASGPVGKALSDACMGTIASFLSKYQDIIIEHQKVVKGNQKRLESLRELAGKENLEYPSVTLPPQPHTKEGVDAYNEVIARVRMWVNLNLWQKLKLSRDDAKPLLRLKGFPSFPLVERQANEVDWWDMVCNVKKLINEKKEDGKVFWQNLAGYKRQEALRPYLSSEEDRKKGKKFARYQLGDLLLHLEKKHGEDWGKVYDEAWERIDKKVEGLSKHIKLEEERRSEDAQSKAALTDWLRAKASFVIEGLKEADKDEFCRCELKLQKWYGDLRGKPFAIEAENSILDISGFSKQYNCAFIWQKDGVKKLNLYLIINYFKGGKLRFKKIKPEAFEANRFYTVINKKSGEIVPMEVNFNFDDPNLIILPLAFGKRQGREFIWNDLLSLETGSLKLANGRVIEKTLYNRRTRQDEPALFVALTFERREVLDSSNIKPMNLIGVDRGENIPAVIALTDPEGCPLSRFKDSLGNPTHILRIGESYKEKQRTIQAKKEVEQRRAGGYSRKYASKAKNLADDMVRNTARDLLYYAVTQDAMLIFENLSRGFGRQGKRTFMAERQYTRMEDWLTAKLAYEGLPSKTYLSKTLAQYTSKTCSNCGFTITSADYDRVLEKLKKTATGWMTTINGKELKVEGQITYYNRYKRQNVVKDLSVELDRLSEESVNNDISSWTKGRSGEALSLLKKRFSHRPVQEKFVCLNCGFETHADEQAALNIARSWLFLRSQEYKKYQTNKTTGNTDKRAFVETWQSFYRKKLKEVWKPAV

SEQ ID NO: 43828 - protein, 976 aa, Artificial Sequence
  CasX Variant
QEIKRINKIRRRLVKDSNTKKAGKTGPMKTLLVRVMTPDLRERLENLRKKPENIPQPISNTSRANLNKLLTDYTEMKKAILHVYWEEFQKDPVGLMSRVAQPASKKIDQNKLKPEMDEKGNLTTAGFACSQCGQPLFVYKLEQVSEKGKAYTNYFGRCNVAEHEKLILLAQLKPEKDSDEAVTYSLGKFGQRALDFYSIHVTKESTHPVKPLAQIAGNRYASGPVGKALSDACMGTIASFLSKYQDIIIEHQKVVKGNQKRLESLRELAGKENLEYPSVTLPPQPHTKEGVDAYNEVIARVRMWVNLNLWQKLKLSRDDAKPLLRLKGFPSFPLVERQANEVDWWVCNVKKLINEKKEDGKVFWQNLAGYKRQEALRPYLSSEEDRKKGKKFARYQLGDLLLHLEKKHGEDWGKVYDEAWERIDKKVEGLSKHIKLEEERRSEDAQSKAALTDWLRAKASFVIEGLKEADKDEFCRCELKLQKWYGDLRGKPFAIEAENSILDISGFSKQYNCAFIWQKDGVKKLNLYLIINYFKGGKLRFKKIKPEAFEANRFYTVINKKSGEIVPMEVNFNFDDPNLIILPLAFGKRQGREFIWNDLLSLETGSLKLANGRVIEKTLYNRRTRQDEPALFVALTFERREVLDSSNIKPMNLIGVDRGENIPAVIALTDPEGCPLSRFKDSLGNPTHILRIGESYKEKQRTIQAKKEVEQRRAGGYSRKYASKAKNLADDMVRNTARDLLYYAVTQDAMLIFENLSRGFGRQGKRTFMAERQYTRMEDWLTAKLAYEGLPSKTYLSKTLAQYTSKTCSNCGFTITSADYDRVLEKLKKTATGWMTTINGKELKVEGQITYYNRYKRQNVVKDLSVELDRLSEESVNNDISSWTKGRSGEALSLLKKRFSHRPVQEKFVCLNCGFETHADEQAALNIARSWLFLRSQEYKKYQTNKTTGNTDKRAFVETWQSFYRKKLKEVWKPAV

SEQ ID NO: 43829 - protein, 978 aa, Artificial Sequence
  CasX Variant
QEIKRINKIRRRLVKDSNTKKAGKTGPMKTLLVRVMTPDLRERLENLRKKPENIPQPISNTSRANLNKLLTDYTEMKKAILHVYWEEFQKDPVGLMSRVAQPASKKIDQNKLKPEMDEKGNLTTAGFACSQCGQPLFVYKLEQVSEKGKAYTNYFGRCNVAEHEKLILLAQLKPEKDSDEAVTYSLGKFGQRALDFYSIHVTKESTHPVKPLAQIAGNRYASGPVGKALSDACMGTIASFLSKYQDIIIEHQKVVKGNQKRLESLRELAGKENLEYPSVTLPPQPHTKEGVDAYNEVIARVRMWVNLNLWQKLKLSRDDAKPLLRLKGFPSFPLVERQANEVDWWDMVCNVKKLINEKKEDGKVFWQNLAGYKRQEALRPYLSSEEDRKKGKKFARYQLGDLLLHLEKKHGEDWGKVYDEAWERIDKKVEGLSKHIKLEEERRSEDAQSKAALTDWLRAKASFVIEGLKEADKDEFCRCELKLQKWYGDLRGKPFAIEAENSILDISGFSKQYNCAFIWQKDGVKKLNLYLIINYFGGGKLRFKKIKPEAFEANRFYTVINKKSGEIVPMEVNFNFDDPNLIILPLAFGKRQGREFIWNDLLSLETGSLKLANGRVIEKTLYNRRTRQDEPALFVALTFERREVLDSSNIKPMNLIGVDRGENIPAVIALTDPEGCPLSRFKDSLGNPTHILRIGESYKEKQRTIQAKKEVEQRRAGGYSRKYASKAKNLADDMVRNTARDLLYYAVTQDAMLIFENLSRGFGRQGKRTFMAERQYTRMEDWLTAKLAYEGLPSKTYLSKTLAQYTSKTCSNCGFTITSADYDRVLEKLKKTATGWMTTINGKELKVEGQITYYNRYKRQNVVKDLSVELDRLSEESVNNDISSWTKGRSGEALSLLKKRFSHRPVQEKFVCLNCGFETHADEQAALNIARSWLFLRSQEYKKYQTNKTTGNTDKRAFVETWQSFYRKKLKEVWKPAV

SEQ ID NO: 43830 - protein, 979 aa, Artificial Sequence
  CasX Variant
QEIKRINKIRRRLVKDSNTKKAGKTGPMKTLLVRVMTPDLRERLENLRKKPENIPQPISNTSRANLNKLLTDYTEMKKAILHVYWEEFQKDPVGLMSRVAQPASKKIDQNKLKPEMDEKGNLTTAGFACSQCGQPLFVYKLEQVSEKGKAYTNYFGRCNVAEHEKLILLAQLKPEKDSDEAVTYSLGKFGQRALDFYSIHVTKESTHPVKPLAQIAGNRYASGPVGKALSDACMGTIASFLSKYQDIIIEHQKVVKGNQKRLESLRELAGKENLEYPSVTLPPQPHTKEGVDAYNEVIARVRMWVNLNLWQKLKLSRDDAKPLLRLKGFPSFPLVERQANEVDWWDMVCNVKKLINEKKEDGKVFWQNLAGYKRQEALRPYLSSEEDRKKGKKFARYQLGDLLLHLEKKHGEDWGKLVYDEAWERIDKKVEGLSKHIKLEEERRSEDAQSKAALTDWLRAKASFVIEGLKEADKDEFCRCELKLQKWYGDLRGKPFAIEAENSILDISGFSKQYNCAFIWQKDGVKKLNLYLIINYFKGGKLRFKKIKPEAFEANRFYTVINKKSGEIVPMEVNFNFDDPNLIILPLAFGKRQGREFIWNDLLSLETGSLKLANGRVIEKTLYNRRTRQDEPALFVALTFERREVLDSSNIKPMNLIGVDRGENIPAVIALTDPEGCPLSRFKDSLGNPTHILRIGESYKEKQRTIQAKKEVEQRRAGGYSRKYASKAKNLADDMVRNTARDLLYYAVTQDAMLIFENLSRGFGRQGKRTFMAERQYTRMEDWLTAKLAYEGLPSKTYLSKTLAQYTSKTCSNCGFTITSADYDRVLEKLKKTATGWMTTINGKELKVEGQITYYNRYKRQNVVKDLSVELDRLSEESVNNDISSWTKGRSGEALSLLKKRFSHRPVQEKFVCLNCGFETHADEQAALNIARSWLFLRSQEYKKYQTNKTTGNTDKRAFVETWQSFYRKKLKEVWKPAV

SEQ ID NO: 43831 - protein, 979 aa, Artificial Sequence
  CasX Variant
QEIKRINKIRRRLVKDSNTKKAGKTGPMKTLLVRVMTPDLRERLENLRKKPENIPQPISNTSRANLNKLLTDYTEMKKAILHVYWEEFQKDPVGLMSRVAQPASKKIDQNKLKPEMDEKGNLTTAGFACSQCGQPLFVYKLEQVSEKGKAYTNYFGRCNVAEHEKLILLAQLKPEKDSDEAVTYSLGKFGQRALDFYSIHVTKESTHPVKPLAQIAGNRYASGPVGKALSDACMGTIASFLSKYQDIIIEHQKVVKGNQKRLESLRELAGKENLEYPSVTLPPQPHTKEGVDAYNEVIARVRMWVNLNLWQKLKLSRDDAKPLLRLKGQFPSFPLVERQANEVDWWDMVCNVKKLINEKKEDGKVFWQNLAGYKRQEALRPYLSSEEDRKKGKKFARYQLGDLLLHLEKKHGEDWGKVYDEAWERIDKKVEGLSKHIKLEEERRSEDAQSKAALTDWLRAKASFVIEGLKEADKDEFCRCELKLQKWYGDLRGKPFAIEAENSILDISGFSKQYNCAFIWQKDGVKKLNLYLIINYFKGGKLRFKKIKPEAFEANRFYTVINKKSGEIVPMEVNFNFDDPNLIILPLAFGKRQGREFIWNDLLSLETGSLKLANGRVIEKTLYNRRTRQDEPALFVALTFERREVLDSSNIKPMNLIGVDRGENIPAVIALTDPEGCPLSRFKDSLGNPTHILRIGESYKEKQRTIQAKKEVEQRRAGGYSRKYASKAKNLADDMVRNTARDLLYYAVTQDAMLIFENLSRGFGRQGKRTFMAERQYTRMEDWLTAKLAYEGLPSKTYLSKTLAQYTSKTCSNCGFTITSADYDRVLEKLKKTATGWMTTINGKELKVEGQITYYNRYKRQNVVKDLSVELDRLSEESVNNDISSWTKGRSGEALSLLKKRFSHRPVQEKFVCLNCGFETHADEQAALNIARSWLFLRSQEYKKYQTNKTTGNTDKRAFVETWQSFYRKKLKEVWKPAV

SEQ ID NO: 43832 - protein, 978 aa, Artificial Sequence
  CasX Variant
QEIKRINKIRRRLVKDSNTKKAGKTGPMKTLLVRVMTPDLRERLENLRKKPENIPQPISNTSRANLNKLLTDYTEMKKAILHVYWEEFQKDPVGLMSRVAQPASKKIDQNKLKPEMDEKGNLTTAGFACSQCGQPLFVYKLEQVSEKGKAYTNYFGRCNVAEHEKLILLAQLKPEKDSDEAVTYSLGKFGQRALDFYSIHVTKESTHPVKPLAQIAGNRYASGPVGKALSDACMGTIASFLSKYQDIIIEHQKVVKGNQKRLESLRELAGKENLEYPSVTLPPQPHTKEGVDAYNEVIARVRMWVNLNLWQKLKLSRDDAKPLLRLKGFPSFPLVERQANEVSWWDMVCNVKKLINEKKEDGKVFWQNLAGYKRQEALRPYLSSEEDRKKGKKFARYQLGDLLLHLEKKHGEDWGKVYDEAWERIDKKVEGLSKHIKLEEERRSEDAQSKAALTDWLRAKASFVIEGLKEADKDEFCRCELKLQKWYGDLRGKPFAIEAENSILDISGFSKQYNCAFIWQKDGVKKLNLYLIINYFKGGKLRFKKIKPEAFEANRFYTVINKKSGEIVPMEVNFNFDDPNLIILPLAFGKRQGREFIWNDLLSLETGSLKLANGRVIEKTLYNRRTRQDEPALFVALTFERREVLDSSNIKPMNLIGVDRGENIPAVIALTDPEGCPLSRFKDSLGNPTHILRIGESYKEKQRTIQAKKEVEQRRAGGYSRKYASKAKNLADDMVRNTARDLLYYAVTQDAMLIFENLSRGFGRQGKRTFMAERQYTRMEDWLTAKLAYEGLPSKTYLSKTLAQYTSKTCSNCGFTITSADYDRVLEKLKKTATGWMTTINGKELKVEGQITYYNRYKRQNVVKDLSVELDRLSEESVNNDISSWTKGRSGEALSLLKKRFSHRPVQEKFVCLNCGFETHADEQAALNIARSWLFLRSQEYKKYQTNKTTGNTDKRAFVETWQSFYRKKLKEVWKPAV

SEQ ID NO: 43833 - protein, 978 aa, Artificial Sequence
  CasX Variant
QEIKRINKIRRRLVKDSNTKKAGKTGPMKTLLVRVMTPDLRERLENLRKKPENIPQPISNTSRANLNKLLTDYTEMKKAILHVYWEEFQKDPVGLMSRVAQPASKKIDQNKLKPEMDEKGNLTTAGFACSQCGQPLFVYKLEQVSEKGKAYTNYFGRCNVAEHEKLILLAQLKPEKDSDEAVTYSLGKFGQRALDFYSIHVTKESTHPVKPLAQIAGNRYASGPVGKALSDACMGTIASFLSKYQDIIIEHQKVVKGNQKRLESLRELAGKENLEYPSVTLPPQPHTKEGVDAYNEVIARVRMWVNLNLWQKLKLSRDDAKPLLRLKGFPSFPLVERQANEVDWWDMVCNVKKLINEKKEDGKVFWQNLAGYKRQEALRPYLSSEEDRKKGKKFARYQLGDLLLHLEKKHGEDWGKVYDEAWERIDKKVEGLSKHIKLEEERRSEDAQSKAALTDWLREKASFVIEGLKEADKDEFCRCELKLQKWYGDLRGKPFAIEAENSILDISGFSKQYNCAFIWQKDGVKKLNLYLIINYFKGGKLRFKKIKPEAFEANRFYTVINKKSGEIVPMEVNFNFDDPNLIILPLAFGKRQGREFIWNDLLSLETGSLKLANGRVIEKTLYNRRTRQDEPALFVALTFERREVLDSSNIKPMNLIGVDRGENIPAVIALTDPEGCPLSRFKDSLGNPTHILRIGESYKEKQRTIQAKKEVEQRRAGGYSRKYASKAKNLADDMVRNTARDLLYYAVTQDAMLIFENLSRGFGRQGKRTFMAERQYTRMEDWLTAKLAYEGLPSKTYLSKTLAQYTSKTCSNCGFTITSADYDRVLEKLKKTATGWMTTINGKELKVEGQITYYNRYKRQNVVKDLSVELDRLSEESVNNDISSWTKGRSGEALSLLKKRFSHRPVQEKFVCLNCGFETHADEQAALNIARSWLFLRSQEYKKYQTNKTTGNTDKRAFVETWQSFYRKKLKEVWKPAV

SEQ ID NO: 43834 - protein, 978 aa, Artificial Sequence
  CasX Variant
QEIKRINKIRRRLVKDSNTKKAGKTGPMKTLLVRVMTPDLRERLENLRKKPENIPQPISNTSRANLNKLLTDYTEMKKAILHVYWEEFQKDPVGLMSRVAQPASKKIDQNKLKPEMDEKGNLTTAGFACSQCGQPLFVYKLEQVSEKGKAYTNYFGRCNVAEHEKLILLAQLKPEKDSDEAVTYSLGKFGQRALDFYSIHVTKESTHPVKPLAQIAGNRYASGPVGKALSDACMGTIASFLSKYQDIIIEHQKVVKGNQKRLESLRELAGKENLEYPSVTLPPQPHTKEGVDAYNEVIARVRMWVNLNLWQKLKLSRDDAKPLLRLKGFPSFPLVERQANEVDWWDMVCNVKKLINEKKEDGKVFWQNLAGYKRQEALRPYLSSEEDRKKGKKFARYQLGDLLLHLEKKHGEDWGKVYDEAWERIDKKVEGLSKHIKLEEERRSEDAQSKAALTDWLRAKASFVIEGLKEADKDEFCRCELKLQKWYGDLRGKPFAIEAENSILDISGFSKQYNCAFIWQKDGVKKLNLYLIINYFKGGKLRFKKIKPEAFEANRFYTVINKKSGEIVPMEVNFNFDDPNLIILPLAFGKRQGREFIWNDLLSLETGSLKLANGRVIEKTTYNRRTRQDEPALFVALTFERREVLDSSNIKPMNLIGVDRGENIPAVIALTDPEGCPLSRFKDSLGNPTHILRIGESYKEKQRTIQAKKEVEQRRAGGYSRKYASKAKNLADDMVRNTARDLLYYAVTQDAMLIFENLSRGFGRQGKRTFMAERQYTRMEDWLTAKLAYEGLPSKTYLSKTLAQYTSKTCSNCGFTITSADYDRVLEKLKKTATGWMTTINGKELKVEGQITYYNRYKRQNVVKDLSVELDRLSEESVNNDISSWTKGRSGEALSLLKKRFSHRPVQEKFVCLNCGFETHADEQAALNIARSWLFLRSQEYKKYQTNKTTGNTDKRAFVETWQSFYRKKLKEVWKPAV

SEQ ID NO: 43835 - protein, 978 aa, Artificial Sequence
  CasX Variant
QEIKRINKIRRRLVKDSNTKKAGKTGPMKTLLVRVMTPDLRERLENLRKKPENIPQPISNTSRANLNKLLTDYTEMKKAILHVYWEEFQKDPVGLMSRVAQPASKKIDQNKLKPEMDEKGNLTTAGFACSQCGQPLFVYKLEQVSEKGKAYTNYFGRCNVAEHEKLILLAQLKPEKDSDEAVTYSLGKFGQRALDFYSIHVTKESTHPVKPLAQIAGNRYASGPVGKALSDACMGTIASFLSKYQDIIIEHQKVVKGNQKRLESLRELAGKENLEYPSVTLPPQPHTKEGVDAYNEVIARVRMWVNLNLWQKLKLSRDDAKPLLRLKGFPSFPLVERQANEVDWWDMVCNVKKLINEKKEDGKVFWQNLAGYKRQEANRPYLSSEEDRKKGKKFARYQLGDLLLHLEKKHGEDWGKVYDEAWERIDKKVEGLSKHIKLEEERRSEDAQSKAALTDWLRAKASFVIEGLKEADKDEFCRCELKLQKWYGDLRGKPFAIEAENSILDISGFSKQYNCAFIWQKDGVKKLNLYLIINYFKGGKLRFKKIKPEAFEANRFYTVINKKSGEIVPMEVNFNFDDPNLIILPLAFGKRQGREFIWNDLLSLETGSLKLANGRVIEKTLYNRRTRQDEPALFVALTFERREVLDSSNIKPMNLIGVDRGENIPAVIALTDPEGCPLSRFKDSLGNPTHILRIGESYKEKQRTIQAKKEVEQRRAGGYSRKYASKAKNLADDMVRNTARDLLYYAVTQDAMLIFENLSRGFGRQGKRTFMAERQYTRMEDWLTAKLAYEGLPSKTYLSKTLAQYTSKTCSNCGFTITSADYDRVLEKLKKTATGWMTTINGKELKVEGQITYYNRYKRQNVVKDLSVELDRLSEESVNNDISSWTKGRSGEALSLLKKRFSHRPVQEKFVCLNCGFETHADEQAALNIARSWLFLRSQEYKKYQTNKTTGNTDKRAFVETWQSFYRKKLKEVWKPAV

SEQ ID NO: 43836 - protein, 978 aa, Artificial Sequence
  CasX Variant
QEIKRINKIRRRLVKDSNTKKAGKTGPMKTLLVRVMTPDLRERLENLRKKPENIPQPISNTSRANLNKLLTDYTEMKKAILHVYWEEFQKDPVGLMSRVAQPASKKIDQNKLKPEMDEKGNLTTAGFACSQCGQPLFVYKLEQVSEKGKAYTNYFGRCNVAEHEKLILLAQLKPEKDSDEAVTYSLGKFGQRALDFYSIHVTKESTHPVKPLAQIAGNRYASGPVGKALSDACMGTIASFLSKYQDIIIEHQKVVKGNQKRLESLRELAGKENLEYPSVTLPPQPHTKEGVDAYNEVIARVRMWVNLNLWQKLKLSRDDAKPLLRLKGFPSFPLVERQANEVDWWDMVCNVKKLINEKKEDGKVFWQNLAGYKRQEALRPYLSSEEDRKKGKKFARYQLGDLLLHLEKKHGEDWGKVYDEAWERIDKKVEGLSKHIKLEELRRSEDAQSKAALTDWLRAKASFVIEGLKEADKDEFCRCELKLQKWYGDLRGKPFAIEAENSILDISGFSKQYNCAFIWQKDGVKKLNLYLIINYFKGGKLRFKKIKPEAFEANRFYTVINKKSGEIVPMEVNFNFDDPNLIILPLAFGKRQGREFIWNDLLSLETGSLKLANGRVIEKTLYNRRTRQDEPALFVALTFERREVLDSSNIKPMNLIGVDRGENIPAVIALTDPEGCPLSRFKDSLGNPTHILRIGESYKEKQRTIQAKKEVEQRRAGGYSRKYASKAKNLADDMVRNTARDLLYYAVTQDAMLIFENLSRGFGRQGKRTFMAERQYTRMEDWLTAKLAYEGLPSKTYLSKTLAQYTSKTCSNCGFTITSADYDRVLEKLKKTATGWMTTINGKELKVEGQITYYNRYKRQNVVKDLSVELDRLSEESVNNDISSWTKGRSGEALSLLKKRFSHRPVQEKFVCLNCGFETHADEQAALNIARSWLFLRSQEYKKYQTNKTTGNTDKRAFVETWQSFYRKKLKEVWKPAV

SEQ ID NO: 43837 - protein, 976 aa, Artificial Sequence
  CasX Variant
QEIKRINKIRRRLVKDSNTKKAGKTGPMKTLLVRVMTPDLRERLENLRKKPENIPQPISNTSRANLNKLLTDYTEMKKAILHVYWEEFQKDPVGLMSRVAQPASKKIDQNKLKPEMDEKGNLTTAGFACSQCGQPLFVYKLEQVSEKGKAYTNYFGRCNVAEHEKLILLAQLKPEKDSDEAVTYSLGKFGQRALDFYSIHVTKESTHPVKPLAQIAGNRYASGPVGKALSDACMGTIASFLSKYQDIIIEHQKVVKGNQKRLESLRELAGKENLEYPSVTLPPQPHTKEGVDAYNEVIARVRMWVNLNLWQKLKLSRDDAKPLLRLKGFPSFPLVERQANEVDWWDMVCNVKKLINEKKEDGKVFWQNLAGYKRQEALRPYLSSEEDRKKGKKFARYQLGDLLLHLEKKHGEDWGKVYDEAWERIDKKVEGLSKHIKLEEERRSEDAQSKAALTDWLRAKASFVIEGLKEADKDERCELKLQKWYGDLRGKPFAIEAENSILDISGFSKQYNCAFIWQKDGVKKLNLYLIINYFKGGKLRFKKIKPEAFEANRFYTVINKKSGEIVPMEVNFNFDDPNLIILPLAFGKRQGREFIWNDLLSLETGSLKLANGRVIEKTLYNRRTRQDEPALFVALTFERREVLDSSNIKPMNLIGVDRGENIPAVIALTDPEGCPLSRFKDSLGNPTHILRIGESYKEKQRTIQAKKEVEQRRAGGYSRKYASKAKNLADDMVRNTARDLLYYAVTQDAMLIFENLSRGFGRQGKRTFMAERQYTRMEDWLTAKLAYEGLPSKTYLSKTLAQYTSKTCSNCGFTITSADYDRVLEKLKKTATGWMTTINGKELKVEGQITYYNRYKRQNVVKDLSVELDRLSEESVNNDISSWTKGRSGEALSLLKKRFSHRPVQEKFVCLNCGFETHADEQAALNIARSWLFLRSQEYKKYQTNKTTGNTDKRAFVETWQSFYRKKLKEVWKPAV

SEQ ID NO: 43838 - protein, 976 aa, Artificial Sequence
  CasX Variant
QEIKRINKIRRRLVKDSNTKKAGKTGPMKTLLVRVMTPDLRERLENLRKKPENIPQPISNTSRANLNKLLTDYTEMKKAILHVYWEEFQKDPVGLMSRVAQPASKKIDQNKLKPEMDEKGNLTTAGFACSQCGQPLFVYKLEQVSEKGKAYTNYFGRCNVAEHEKLILLAQLKPEKDSDEAVTYSLGKFGQRALDFYSIHVTKESTHPVKPLAQIAGNRYASGPVGKALSDACMGTIASFLSKYQDIIIEHQKVVKGNQKRLESLRELAGKENLEYPSVTLPPQPHTKEGVDAYNEVIARVRMWVNLNLWQKLKLSRDDAKPLLRLKGFPSFPLVERQANEVDWWDMVCNVKKLINEKKEDGKVFWQNLAGYKRALRPYLSSEEDRKKGKKFARYQLGDLLLHLEKKHGEDWGKVYDEAWERIDKKVEGLSKHIKLEEERRSEDAQSKAALTDWLRAKASFVIEGLKEADKDEFCRCELKLQKWYGDLRGKPFAIEAENSILDISGFSKQYNCAFIWQKDGVKKLNLYLIINYFKGGKLRFKKIKPEAFEANRFYTVINKKSGEIVPMEVNFNFDDPNLIILPLAFGKRQGREFIWNDLLSLETGSLKLANGRVIEKTLYNRRTRQDEPALFVALTFERREVLDSSNIKPMNLIGVDRGENIPAVIALTDPEGCPLSRFKDSLGNPTHILRIGESYKEKQRTIQAKKEVEQRRAGGYSRKYASKAKNLADDMVRNTARDLLYYAVTQDAMLIFENLSRGFGRQGKRTFMAERQYTRMEDWLTAKLAYEGLPSKTYLSKTLAQYTSKTCSNCGFTITSADYDRVLEKLKKTATGWMTTINGKELKVEGQITYYNRYKRQNVVKDLSVELDRLSEESVNNDISSWTKGRSGEALSLLKKRFSHRPVQEKFVCLNCGFETHADEQAALNIARSWLFLRSQEYKKYQTNKTTGNTDKRAFVETWQSFYRKKLKEVWKPAV

SEQ ID NO: 43839 - protein, 978 aa, Artificial Sequence
  CasX Variant
QEIKRINKIRRRLVKDSNTKKAGKTGPMKTLLVRVMTPDLRERLENLRKKPENIPQPISNTSRANLNKLLTDYTEMKKAILHVYWEEFQKDPVGLMSRVAQPASKKIDQNKLKPEMDEKGNLTTAGFACSQCGQPLFVYKLEQVSEKGKAYTNYFGRCNVAEHEKLILLAQLKPEKDSDEAVTYSLGKFGQRALDFYSIHVTKESTHPVKPLAQIAGNRYASGPVGKALSDACMGTIASFLSKYQDIIIEHQKVVKGNQKRLESLRELAGKENLEYPSVTLPPQPHTKEGVDAYNEVIARVRMWVNLNLWQKLKLSRDDAKPLLRLKGFPSFPLVERQANEVDWWDMVCNVKKLINEKKEDGKVFWQNLAGYKRQEALRPYLSSEEDRQKGKKFARYQLGDLLLHLEKKHGEDWGKVYDEAWERIDKKVEGLSKHIKLEEERRSEDAQSKAALTDWLRAKASFVIEGLKEADKDEFCRCELKLQKWYGDLRGKPFAIEAENSILDISGFSKQYNCAFIWQKDGVKKLNLYLIINYFKGGKLRFKKIKPEAFEANRFYTVINKKSGEIVPMEVNFNFDDPNLIILPLAFGKRQGREFIWNDLLSLETGSLKLANGRVIEKTLYNRRTRQDEPALFVALTFERREVLDSSNIKPMNLIGVDRGENIPAVIALTDPEGCPLSRFKDSLGNPTHILRIGESYKEKQRTIQAKKEVEQRRAGGYSRKYASKAKNLADDMVRNTARDLLYYAVTQDAMLIFENLSRGFGRQGKRTFMAERQYTRMEDWLTAKLAYEGLPSKTYLSKTLAQYTSKTCSNCGFTITSADYDRVLEKLKKTATGWMTTINGKELKVEGQITYYNRYKRQNVVKDLSVELDRLSEESVNNDISSWTKGRSGEALSLLKKRFSHRPVQEKFVCLNCGFETHADEQAALNIARSWLFLRSQEYKKYQTNKTTGNTDKRAFVETWQSFYRKKLKEVWKPAV

SEQ ID NO: 43840 - protein, 978 aa, Artificial Sequence
  CasX Variant
QEIKRLNKIRRRLVKDSNTKKAGKTGPMKTLLVRVMTPDLRERLENLRKKPENIPQPISNTSRANLNKLLTDYTEMKKAILHVYWEEFQKDPVGLMSRVAQPASKKIDQNKLKPEMDEKGNLTTAGFACSQCGQPLFVYKLEQVSEKGKAYTNYFGRCNVAEHEKLILLAQLKPEKDSDEAVTYSLGKFGQRALDFYSIHVTKESTHPVKPLAQIAGNRYASGPVGKALSDACMGTIASFLSKYQDIIIEHQKVVKGNQKRLESLRELAGKENLEYPSVTLPPQPHTKEGVDAYNEVIARVRMWVNLNLWQKLKLSRDDAKPLLRLKGFPSFPLVERQANEVDWWDMVCNVKKLINEKKEDGKVFWQNLAGYKRQEALRPYLSSEEDRKKGKKFARYQLGDLLLHLEKKHGEDWGKVYDEAWERIDKKVEGLSKHIKLEEERRSEDAQSKAALTDWLRAKASFVIEGLKEADKDEFCRCELKLQKWYGDLRGKPFAIEAENSILDISGFSKQYNCAFIWQKDGVKKLNLYLIINYFKGGKLRFKKIKPEAFEANRFYTVINKKSGEIVPMEVNFNFDDPNLIILPLAFGKRQGREFIWNDLLSLETGSLKLANGRVIEKTLYNRRTRQDEPALFVALTFERREVLDSSNIKPMNLIGVDRGENIPAVIALTDPEGCPLSRFKDSLGNPTHILRIGESYKEKQRTIQAKKEVEQRRAGGYSRKYASKAKNLADDMVRNTARDLLYYAVTQDAMLIFENLSRGFGRQGKRTFMAERQYTRMEDWLTAKLAYEGLPSKTYLSKTLAQYTSKTCSNCGFTITSADYDRVLEKLKKTATGWMTTINGKELKVEGQITYYNRYKRQNVVKDLSVELDRLSEESVNNDISSWTKGRSGEALSLLKKRFSHRPVQEKFVCLNCGFETHADEQAALNIARSWLFLRSQEYKKYQTNKTTGNTDKRAFVETWQSFYRKKLKEVWKPAV

SEQ ID NO: 43841 - protein, 978 aa, Artificial Sequence
  CasX Variant
QEIKRINKIRRRLVKDSNTKKAGKTGPMKTLLVRVMTPDLRERLENLRKKPENIPQPISNTSRANLNKLLTDYTEMKKAILHVYWEEFQKDPVGLMSRVAQPASKKIDQNKLKPEMDEKGNLTTAGFACSQCGQPLFVYKLEQVSEKGKAYTNYFGRCNVAEHEKLILLAQLKPEKDSDEAVTYSLGKFGQRALDFYSIHVTKESTHPVKPLAQIAGNRYASGPVGKALSDACMGTIASFLSKYQDIIIEHQKVVKGNQKRLESLRELAGKENLEYPSVTLPPQPHTKEGVDAYNEVIARVRMWVNLNLWQKLKLSRDDAKPLLRLKGFPSFPLVERQANEVDWWDMVCNVKKLINEKKEDGKVFWQNLAGYKRQEALRPYLSSEEDRKKGKKFARYQLGDLLLHLEKKHGEDWGKVYDEAWERIDKKVEGLSKHIKLEEERRSEDAQSKAALTDWLDAKASFVIEGLKEADKDEFCRCELKLQKWYGDLRGKPFAIEAENSILDISGFSKQYNCAFIWQKDGVKKLNLYLIINYFKGGKLRFKKIKPEAFEANRFYTVINKKSGEIVPMEVNFNFDDPNLIILPLAFGKRQGREFIWNDLLSLETGSLKLANGRVIEKTLYNRRTRQDEPALFVALTFERREVLDSSNIKPMNLIGVDRGENIPAVIALTDPEGCPLSRFKDSLGNPTHILRIGESYKEKQRTIQAKKEVEQRRAGGYSRKYASKAKNLADDMVRNTARDLLYYAVTQDAMLIFENLSRGFGRQGKRTFMAERQYTRMEDWLTAKLAYEGLPSKTYLSKTLAQYTSKTCSNCGFTITSADYDRVLEKLKKTATGWMTTINGKELKVEGQITYYNRYKRQNVVKDLSVELDRLSEESVNNDISSWTKGRSGEALSLLKKRFSHRPVQEKFVCLNCGFETHADEQAALNIARSWLFLRSQEYKKYQTNKTTGNTDKRAFVETWQSFYRKKLKEVWKPAV

SEQ ID NO: 43842 - protein, 976 aa, Artificial Sequence
  CasX Variant
QEIKRINKIRRRLVKDSNTKKAGKTGPMKTLLVRVMTPDLRERLENLRKKPENIPQPISNTSRANLNKLLTDYTEMKKAILHVYWEEFQKDPVGLMSRVAQPASKKIDQNKLKPEMDEKGNLTTAGFACSQCGQPLFVYKLEQVSEKGKAYTNYFGRCNVAEHEKLILLAQLKPEKDSDEAVTYSLGKFGQRALDFYSIHVTKESTHPVKPLAQIAGNRYASGPVGKALSDACMGTIASFLSKYQDIIIEHQKVVKGNQKRLESLRELAGKENLEYPSVTLPPQPHTKEGVDAYNEVIARVRMWVNLNLWQKLKLSRDDAKPLLRLKGFPSFPLVERQANEVDWWDMVCNVKKLINEKKEDGKVFWQNLAGYKRQEALRPYLSSEEDRKKGKKFARYQLGDLLLHLEKKHGEDWGKVYDEAWERIDKKVEGLSKHIKLEEERRSEDAQSKAALTDWLRAKASFVIEGLKEADKDEFCRCELKLQKWYGDLRGKPFAIEAENSDISGFSKQYNCAFIWQKDGVKKLNLYLIINYFKGGKLRFKKIKPEAFEANRFYTVINKKSGEIVPMEVNFNFDDPNLIILPLAFGKRQGREFIWNDLLSLETGSLKLANGRVIEKTLYNRRTRQDEPALFVALTFERREVLDSSNIKPMNLIGVDRGENIPAVIALTDPEGCPLSRFKDSLGNPTHILRIGESYKEKQRTIQAKKEVEQRRAGGYSRKYASKAKNLADDMVRNTARDLLYYAVTQDAMLIFENLSRGFGRQGKRTFMAERQYTRMEDWLTAKLAYEGLPSKTYLSKTLAQYTSKTCSNCGFTITSADYDRVLEKLKKTATGWMTTINGKELKVEGQITYYNRYKRQNVVKDLSVELDRLSEESVNNDISSWTKGRSGEALSLLKKRFSHRPVQEKFVCLNCGFETHADEQAALNIARSWLFLRSQEYKKYQTNKTTGNTDKRAFVETWQSFYRKKLKEVWKPAV

SEQ ID NO: 43843 - protein, 978 aa, Artificial Sequence
  CasX Variant
QEIKRINKIRRRLVKDSNTKKAGKTGPMKTLLVRVMTPDLRERLENLRKKPENIPQPISNTSRANLNKLLTDYTEMKKAILHVYWEEFQKDPVGLMSRVAQPASKKIDQNKLKPEMDEKGNLTTAGFACSQCGQPLFVYKLEQVSEKGKAYTNYVGRCNVAEHEKLILLAQLKPEKDSDEAVTYSLGKFGQRALDFYSIHVTKESTHPVKPLAQIAGNRYASGPVGKALSDACMGTIASFLSKYQDIIIEHQKVVKGNQKRLESLRELAGKENLEYPSVTLPPQPHTKEGVDAYNEVIARVRMWVNLNLWQKLKLSRDDAKPLLRLKGFPSFPLVERQANEVDWWDMVCNVKKLINEKKEDGKVFWQNLAGYKRQEALRPYLSSEEDRKKGKKFARYQLGDLLLHLEKKHGEDWGKVYDEAWERIDKKVEGLSKHIKLEEERRSEDAQSKAALTDWLRAKASFVIEGLKEADKDEFCRCELKLQKWYGDLRGKPFAIEAENSILDISGFSKQYNCAFIWQKDGVKKLNLYLIINYFKGGKLRFKKIKPEAFEANRFYTVINKKSGEIVPMEVNFNFDDPNLIILPLAFGKRQGREFIWNDLLSLETGSLKLANGRVIEKTLYNRRTRQDEPALFVALTFERREVLDSSNIKPMNLIGVDRGENIPAVIALTDPEGCPLSRFKDSLGNPTHILRIGESYKEKQRTIQAKKEVEQRRAGGYSRKYASKAKNLADDMVRNTARDLLYYAVTQDAMLIFENLSRGFGRQGKRTFMAERQYTRMEDWLTAKLAYEGLPSKTYLSKTLAQYTSKTCSNCGFTITSADYDRVLEKLKKTATGWMTTINGKELKVEGQITYYNRYKRQNVVKDLSVELDRLSEESVNNDISSWTKGRSGEALSLLKKRFSHRPVQEKFVCLNCGFETHADEQAALNIARSWLFLRSQEYKKYQTNKTTGNTDKRAFVETWQSFYRKKLKEVWKPAV

SEQ ID NO: 43844 - protein, 979 aa, Artificial Sequence
  CasX Variant
QEIKRINKIRRRLVKDSNTKKAGKTGPMKTLLVRVMTPDLRERLENLRKKPENIPQPISNTSRANLNKLLTDYTEMKKAILHVYWEEFQKDPVGLMSRVAQPASKKIDQNKLKPEMDEKGNLTTAGFACSQCGQPLFVYKLEQVSEKGKAYTNYFGRCNVAEHEKLILLAQLKPEKDSDEAVTYSLGKFGQRALDFYSIHVTKESTHPVKPLAQIAGNRYASGPVGKALSDACMGTIASFLSKYQDIIIEHQKVVKGNQKRLESLRELAGKENLEYPSVTLPPQPHTKEGVDAYNEVIARVRMWVNLNLWQKLKLSRDDAKPLLRLKGFPSFPLVERQANEVDWWDMVCNVKKLINGEKKEDGKVFWQNLAGYKRQEALRPYLSSEEDRKKGKKFARYQLGDLLLHLEKKHGEDWGKVYDEAWERIDKKVEGLSKHIKLEEERRSEDAQSKAALTDWLRAKASFVIEGLKEADKDEFCRCELKLQKWYGDLRGKPFAIEAENSILDISGFSKQYNCAFIWQKDGVKKLNLYLIINYFKGGKLRFKKIKPEAFEANRFYTVINKKSGEIVPMEVNFNFDDPNLIILPLAFGKRQGREFIWNDLLSLETGSLKLANGRVIEKTLYNRRTRQDEPALFVALTFERREVLDSSNIKPMNLIGVDRGENIPAVIALTDPEGCPLSRFKDSLGNPTHILRIGESYKEKQRTIQAKKEVEQRRAGGYSRKYASKAKNLADDMVRNTARDLLYYAVTQDAMLIFENLSRGFGRQGKRTFMAERQYTRMEDWLTAKLAYEGLPSKTYLSKTLAQYTSKTCSNCGFTITSADYDRVLEKLKKTATGWMTTINGKELKVEGQITYYNRYKRQNVVKDLSVELDRLSEESVNNDISSWTKGRSGEALSLLKKRFSHRPVQEKFVCLNCGFETHADEQAALNIARSWLFLRSQEYKKYQTNKTTGNTDKRAFVETWQSFYRKKLKEVWKPAV

SEQ ID NO: 43845 - protein, 978 aa, Artificial Sequence
  CasX Variant
QEIKRINKIRRRLVKDSNTKKAGKTGPMKTLLVRVMTPDLRERLENLRKKPENIPQPISNTSRANLNKLLTDYTEMKKAILHVYWEEFQKDPVGLMSRVAQPASKKIDQNKLKPEMDEKGNLTTAGFACSQCGQPLFVYKLEQVSEKGKAYTNYFGRCNVAEHEKLILLAQLKPEKDSDEAVTYSLGKFGQRALDFYSIHVTKESTHPVKPLAQIAGNRFASGPVGKALSDACMGTIASFLSKYQDIIIEHQKVVKGNQKRLESLRELAGKENLEYPSVTLPPQPHTKEGVDAYNEVIARVRMWVNLNLWQKLKLSRDDAKPLLRLKGFPSFPLVERQANEVDWWDMVCNVKKLINEKKEDGKVFWQNLAGYKRQEALRPYLSSEEDRKKGKKFARYQLGDLLLHLEKKHGEDWGKVYDEAWERIDKKVEGLSKHIKLEEERRSEDAQSKAALTDWLRAKASFVIEGLKEADKDEFCRCELKLQKWYGDLRGKPFAIEAENSILDISGFSKQYNCAFIWQKDGVKKLNLYLIINYFKGGKLRFKKIKPEAFEANRFYTVINKKSGEIVPMEVNFNFDDPNLIILPLAFGKRQGREFIWNDLLSLETGSLKLANGRVIEKTLYNRRTRQDEPALFVALTFERREVLDSSNIKPMNLIGVDRGENIPAVIALTDPEGCPLSRFKDSLGNPTHILRIGESYKEKQRTIQAKKEVEQRRAGGYSRKYASKAKNLADDMVRNTARDLLYYAVTQDAMLIFENLSRGFGRQGKRTFMAERQYTRMEDWLTAKLAYEGLPSKTYLSKTLAQYTSKTCSNCGFTITSADYDRVLEKLKKTATGWMTTINGKELKVEGQITYYNRYKRQNVVKDLSVELDRLSEESVNNDISSWTKGRSGEALSLLKKRFSHRPVQEKFVCLNCGFETHADEQAALNIARSWLFLRSQEYKKYQTNKTTGNTDKRAFVETWQSFYRKKLKEVWKPAV

SEQ ID NO: 43846 - protein, 978 aa, Artificial Sequence
  CasX Variant
QEIKRINKIRRRLVKDSNTKKAGKTGPMKTLLVRVMTPDLRERLENLRKKPENIPQPISNTSRANLNKLLTDYTEMKKAILHVYWEEFQKDPVGLMSRVAQPASKKIDQNKLKPEMDEKGNLTTAGFACSQCGQPLFVYKLEQVSEKGKAYTNYFGRCNVAEHEKLILLAQLKPEKDSDEAVTYSLGKFGQRALDFYSIHVTKESTHPVKPLAQIAGNRYASGPVGKALSDACMGTIASFLSKYQDIIIEHQKVVKGNQKRLESLRELAGKENLEYPSVTLPPQPHTKEGVDAYNEVIARVRMWVNLNLWQKLKLSRDDAKPLLRLKGFPSFPLVERQANEVDWWDMVCNVKKLINEKKEDGKVFWQNLAGYKRQEALRPYLSSEEDRKKGKKFARYQLGDLLLHLEKKHGEDWGKVYDEAWERIDKKVEGLSKHIKLEEERRSEDAQSKAALTDWLRAKASFVIEGLKEADKDEFCRCELKLQKWYGDLRGKPFAIEAENSILDISGFSKQYNCAFIWQKDGVKKLNLYLIINYFKGGKLRFKKIKPEAFEANRFYTVINKKSGEIVPMEVNFNFDDPNLIILPLAFGKRQGREFIWNDLLSLETGSLKLANGRVIEKTLYNRRTRQDEPALFVALTFERREVLDSSNIKPMNLIGVDRGENIPAVIALTDPEGCPLSRFKDSLGNPTHILRIGESYKEKQRTIQAKKEVEQRRAGGYSRKYASKAKNLADDMVRNTARDLLYYAVTQDAMLIFENLSRGFGRQGKRTFMAERQYTRMEDWYTAKLAYEGLPSKTYLSKTLAQYTSKTCSNCGFTITSADYDRVLEKLKKTATGWMTTINGKELKVEGQITYYNRYKRQNVVKDLSVELDRLSEESVNNDISSWTKGRSGEALSLLKKRFSHRPVQEKFVCLNCGFETHADEQAALNIARSWLFLRSQEYKKYQTNKTTGNTDKRAFVETWQSFYRKKLKEVWKPAV

SEQ ID NO: 43847 - protein, 979 aa, Artificial Sequence
  CasX Variant
QEIKRINKIRRRLVKDSNTKKAGKTGPMKTLLVRVMTPDLRERLENLRKKPENIPQPISNTSRANLNKLLTDYTEMKKAILHVYWEEFQKDPVGLMSRVAQPASKKIDQNKLKPEMDEKGNLTTAGFACSQCGQPLFVYKLEQVSEKGKAYTNYFGRCNVAEHEKLILLAQLKPEKDSDEAVTYSLGKFGQRALDFYSIHVTKESTHPVKPLAQIAGNRYASGPVGKALSDACMGTIASFLSKYQDIIIEHQKVVKGNQKRLESLRELAGKENLEYPSVTLPPQPHTKEGVDAYNEVIARVRMWVNLNLWQKLKLSRDDAKPLLRLKGFPSFPLVERQANEVDWWDMVPCNVKKLINEKKEDGKVFWQNLAGYKRQEALRPYLSSEEDRKKGKKFARYQLGDLLLHLEKKHGEDWGKVYDEAWERIDKKVEGLSKHIKLEEERRSEDAQSKAALTDWLRAKASFVIEGLKEADKDEFCRCELKLQKWYGDLRGKPFAIEAENSILDISGFSKQYNCAFIWQKDGVKKLNLYLIINYFKGGKLRFKKIKPEAFEANRFYTVINKKSGEIVPMEVNFNFDDPNLIILPLAFGKRQGREFIWNDLLSLETGSLKLANGRVIEKTLYNRRTRQDEPALFVALTFERREVLDSSNIKPMNLIGVDRGENIPAVIALTDPEGCPLSRFKDSLGNPTHILRIGESYKEKQRTIQAKKEVEQRRAGGYSRKYASKAKNLADDMVRNTARDLLYYAVTQDAMLIFENLSRGFGRQGKRTFMAERQYTRMEDWLTAKLAYEGLPSKTYLSKTLAQYTSKTCSNCGFTITSADYDRVLEKLKKTATGWMTTINGKELKVEGQITYYNRYKRQNVVKDLSVELDRLSEESVNNDISSWTKGRSGEALSLLKKRFSHRPVQEKFVCLNCGFETHADEQAALNIARSWLFLRSQEYKKYQTNKTTGNTDKRAFVETWQSFYRKKLKEVWKPAV

SEQ ID NO: 43848 - protein, 979 aa, Artificial Sequence
  CasX Variant
QEIKRINKIRRRLVKDSNTKKAGKTGPMKTLLVRVMTPDLRERLENLRKKPENIPQPISNTSRANLNKLLTDYTEMKKAILHVYWEEFQKDPVGLMSRVAQPASKKIDQNKLKPEMDEKGNLTTAGFACSQCGQPLFVYKLEQVSEKGKAYTNYFGRCNVAEHEKLILLAQLKPEKDSDEAVTYSLGKFGQRALDFYSIHVTKESTHPVKPLAQTIAGNRYASGPVGKALSDACMGTIASFLSKYQDIIIEHQKVVKGNQKRLESLRELAGKENLEYPSVTLPPQPHTKEGVDAYNEVIARVRMWVNLNLWQKLKLSRDDAKPLLRLKGFPSFPLVERQANEVDWWDMVCNVKKLINEKKEDGKVFWQNLAGYKRQEALRPYLSSEEDRKKGKKFARYQLGDLLLHLEKKHGEDWGKVYDEAWERIDKKVEGLSKHIKLEEERRSEDAQSKAALTDWLRAKASFVIEGLKEADKDEFCRCELKLQKWYGDLRGKPFAIEAENSILDISGFSKQYNCAFIWQKDGVKKLNLYLIINYFKGGKLRFKKIKPEAFEANRFYTVINKKSGEIVPMEVNFNFDDPNLIILPLAFGKRQGREFIWNDLLSLETGSLKLANGRVIEKTLYNRRTRQDEPALFVALTFERREVLDSSNIKPMNLIGVDRGENIPAVIALTDPEGCPLSRFKDSLGNPTHILRIGESYKEKQRTIQAKKEVEQRRAGGYSRKYASKAKNLADDMVRNTARDLLYYAVTQDAMLIFENLSRGFGRQGKRTFMAERQYTRMEDWLTAKLAYEGLPSKTYLSKTLAQYTSKTCSNCGFTITSADYDRVLEKLKKTATGWMTTINGKELKVEGQITYYNRYKRQNVVKDLSVELDRLSEESVNNDISSWTKGRSGEALSLLKKRFSHRPVQEKFVCLNCGFETHADEQAALNIARSWLFLRSQEYKKYQTNKTTGNTDKRAFVETWQSFYRKKLKEVWKPAV

SEQ ID NO: 43849 - protein, 978 aa, Artificial Sequence
  CasX Variant
QEIKRINKIRRRLVKDSNTKKAGKTGPMKTLLVRVMTPDLRERLENLRKKPENIPQPISNTSRANLNKLLTDYTEMKKAILHVYWEEFQKDPVGLMSRVAQPASKKIDQNKLKPEMDEKGNLTTAGFACSQCGQPLFVYKLEQVSEKGKAYTNYFGRCNVAEHEKLILLAQLKPEKDSDEAVTYSLGKFGQRALDFYSIHVTKESTHPVKPLAQIAGNRYASGPVGKALSDACMGTIASFLSKYQDIIIEHQKVVKGNQKRLESLRELAGKENLEYPSVTLPPQPHTKEGVDAYNEVIARVRMWVNLNLWQKLKLSRDDAKPLLRLKGFPSFPLVERQANEVDWWDMVCNVKKLINEKKEDGKVFWQNLAGYKRQEALRPYLSSEEDRKKGKKFARYQLGDLLLHLEKKHGEDWGKVYDEAWERIDKKVEGLSKHIKLEEERRSEDAQSKAALTDWLRAKASFVIEGLKEADKDEFCRCELKLQKWYGDLRGKPFAIEAENSILDISGFSKQYNCAFIWQKDGVKKLNLYLIINYFKGGKLRFKKIKPEAFEANRFYTVINKKSGEIVPMEVNFNFDDPNLIILPLAFGKRQGREFIWNDLLSLETGSLKLANGRVIEKTLYNRRTRQDEPALFVALTFERREVLDSSNIKPMNLIGVDRGENIPAVIALTDPEGCPLSRFKDSLGNPTHILRIGESYKEKQRTIQAKKEVEQRRAGGYSRKYASKAKNLADDMVRNTARDLLYYAVTQDAMLIFENLSRGFGRQGKRTFMAERQYTRMEDWLTAKLAYEGLPSKTYLSKTLAQYTSKTCSNCGFTITSADYDRVLEKLKKTATGWMTTINGKELKVEGQITYYNRYKRQNVVKDLSVELDRLSEESVNNDISSWTKGRSGEALSLLKKRFSHRPCQEKFVCLNCGFETHADEQAALNIARSWLFLRSQEYKKYQTNKTTGNTDKRAFVETWQSFYRKKLKEVWKPAV

SEQ ID NO: 43850 - protein, 979 aa, Artificial Sequence
  CasX Variant
QEIKRINKIRRRLVKDSNTKKAGKTGPMKTLLVRVMTPDLRERLENLPRKKPENIPQPISNTSRANLNKLLTDYTEMKKAILHVYWEEFQKDPVGLMSRVAQPASKKIDQNKLKPEMDEKGNLTTAGFACSQCGQPLFVYKLEQVSEKGKAYTNYFGRCNVAEHEKLILLAQLKPEKDSDEAVTYSLGKFGQRALDFYSIHVTKESTHPVKPLAQIAGNRYASGPVGKALSDACMGTIASFLSKYQDIIIEHQKVVKGNQKRLESLRELAGKENLEYPSVTLPPQPHTKEGVDAYNEVIARVRMWVNLNLWQKLKLSRDDAKPLLRLKGFPSFPLVERQANEVDWWDMVCNVKKLINEKKEDGKVFWQNLAGYKRQEALRPYLSSEEDRKKGKKFARYQLGDLLLHLEKKHGEDWGKVYDEAWERIDKKVEGLSKHIKLEEERRSEDAQSKAALTDWLRAKASFVIEGLKEADKDEFCRCELKLQKWYGDLRGKPFAIEAENSILDISGFSKQYNCAFIWQKDGVKKLNLYLIINYFKGGKLRFKKIKPEAFEANRFYTVINKKSGEIVPMEVNFNFDDPNLIILPLAFGKRQGREFIWNDLLSLETGSLKLANGRVIEKTLYNRRTRQDEPALFVALTFERREVLDSSNIKPMNLIGVDRGENIPAVIALTDPEGCPLSRFKDSLGNPTHILRIGESYKEKQRTIQAKKEVEQRRAGGYSRKYASKAKNLADDMVRNTARDLLYYAVTQDAMLIFENLSRGFGRQGKRTFMAERQYTRMEDWLTAKLAYEGLPSKTYLSKTLAQYTSKTCSNCGFTITSADYDRVLEKLKKTATGWMTTINGKELKVEGQITYYNRYKRQNVVKDLSVELDRLSEESVNNDISSWTKGRSGEALSLLKKRFSHRPVQEKFVCLNCGFETHADEQAALNIARSWLFLRSQEYKKYQTNKTTGNTDKRAFVETWQSFYRKKLKEVWKPAV

SEQ ID NO: 43851 - protein, 978 aa, Artificial Sequence
  CasX Variant
QEIKRINKIRRRLVKDSNTKKAGKTGPMKTLLVRVMTPDLRERLENLRKKPENIPQPISNTSRANLNKLLTDYTEMKKAILHVYWEEFQKDPVGLMSRVAQPASKKIDQNKLKPEMDEKGNLTTAGFACSQCGQPLFVYKLEQVSEKGKAYTNYFGRCNVAEHEKLILLAQLKPEKDSDEAVTYSLGKFGQRALDFYSIHVTKESTHPVKPLAQIAGNRYASGPVGKALSDACMGTIASFLSKYQDIIIEHQKVVKGNQKRLESLRELAGKENLEYPSVTLPPQPHTKEGVDAYNEVIARVRMWVNLNLWQKLKLSRDDAKPLLRLKGFPSFPLVERQANEVDWWDMVCNVKKLINEKKEDGKVFWQNLAGYKRQEALRPYLSSEEDRKKGKKFARYQLGDLLLHLEKKHGEDWGKVYDEAWERIDKKVEGLSKHIKLEEERRSEDAQSKAALTDWLRAKASFVIEGLKEADKDEFCRCELKLQKWYGDLRGKPFAIEAENSILDISGFSKQYNCAFIWQKDGVKKLNLYLIINYFKGGKLRFKKIKPEAFEANRFYTVINKKSGEIVPMEVNFNFDDPNLIILPLAFGKRQGREFIWNDLLSLETGSLKLANGRVIEKTLYNRRTRQDEPALFVALTFERREVLDSSNIKPMNLIGVDRGENIPAVIALTDPEGCPLSRFKDSLGNPTHILRIGESYKEKQRTIQAKKEVEQRRAGGYSRKYASKAKNLADDMVRNTARDLLYYAVTQDAMLIFENLSRGFGRQGKRTFMAERQYTRMEDWLTAKLAYEGLPSKTYLSKTLAQYTSKTCSNCGFTITSADYDRVLEGLKKTATGWMTTINGKELKVEGQITYYNRYKRQNVVKDLSVELDRLSEESVNNDISSWTKGRSGEALSLLKKRFSHRPVQEKFVCLNCGFETHADEQAALNIARSWLFLRSQEYKKYQTNKTTGNTDKRAFVETWQSFYRKKLKEVWKPAV

SEQ ID NO: 43852 - protein, 977 aa, Artificial Sequence
  CasX Variant
QEIKRINKIRRRLVKDSNTKKAGKTGPMKTLLVRVMTPDLRERLENLRKKPENIPQPISNTSRANLNKLLTDYTEMKKAILHVYWEEFQKDPVGLMSRVAQPASKKIDQNKLKPEMDEKGNLTTAGFACSQCGQPLFVYKLEQVSEKGKAYTNYFGRCNVAEHEKLILLAQLKPEKDSDEAVTYSLGKFGQRALDFYSIHVTKESTHPVKPLAQIAGNRYASGPVGKALSDACMGTIASFLSKYQDIIIEHQKVVKGNQKRLESLRELAGKENLEYPSVTLPPQPHTKEGVDAYNEVIARVRMWVNLNLWQKLKLSRDDAKPLLRLKGFPSFPLVERQANEVDWWDMVCNVKKLINEKKEDGKVFWQNLAGYKRQEALRPYLSSEEDRKKGKKFARYQLGDLLLHLEKKHGEDWGKVYDEAWERIDKKVEGLSKHIKLEEERRSEDAQSKAALTDWLRAKASFVIEGLKEADKDEFCRCELKLQKWYGDLRGKPFAIEAENSILDISGFSKQYNCAFIWQKDGVKKLNLYLIINYFKGGKLRFKKIKPEAFEANRFYTVINKKSGEIVPMEVNFNFDDPNLIILPLAFGKRQGREFIWNDLLSLETGSLKLANGRVIEKTLYNRRTRQDEPALFVALTFERREVLDSSNIKPMNLIGVDRGENIPAVIALTDPEGCPLSRFKDSLGNPTHILRIGESYKEKQRTIQAKKEVEQRRAGGYSRKYASKAKNLADDMVRNTARDLLYYAVTQDAMLIFENLSRGFGRQGKRTFMAERQYTRMEDWLTAKLAYEGLPSKTYLSKTLAQTSKTCSNCGFTITSADYDRVLEKLKKTATGWMTTINGKELKVEGQITYYNRYKRQNVVKDLSVELDRLSEESVNNDISSWTKGRSGEALSLLKKRFSHRPVQEKFVCLNCGFETHADEQAALNIARSWLFLRSQEYKKYQTNKTTGNTDKRAFVETWQSFYRKKLKEVWKPAV

SEQ ID NO: 43853 - protein, 979 aa, Artificial Sequence
  CasX Variant
QEIKRINKIRRRLVKDSNTKKAGKTGPMKTLLVRVMTPDLRERLENLRKKPENIPQPISNTSRANLNKLLTDYTEMKKAILHVYWEEFQKDPVGLMSRVAQPASKKIDQNKLKPEMDEKGNLTTAGFACSQCGQPLFVYKLEQVSEKGKAYTNYFGRCNVAEHEKLILLAQLKPEKDSDEAVTYSLGKFGQRALDFYSIHVTKESTHPVKPLAQIAGNRYASGPVGKALSDACMGTIASFLSKYQDIIIEHQKVVKGNQKRLESLRELAGKENLEYPSVTLPPQPHTKEGVDAYNEVIARVRMWVNLNLWQKLKLSRDDAKPLLRLKGFPSFPLVERQANEVDWWDMVCNVKKLINEKKEDGKVFWQNLAGYKRQEALRPYLSSEEDRKKGKKFARYQLGDLLLHLEKKHGEDWGKVYDEAWERIDKKVEGLSKHIKLEEERRSEDAQSKAALTDWLRAKASFVIEGLKEADKDEFCRCELKLQKWYGDLRGKPFAIEAENSILDISGFSKQYNCAFIWQKDGVKKLNLYLIINYFKGGKLRFKKIKPEAFEANRFYTVINKKSGEIVPMEVNFNFDDPNLIILPLAFGKRQGREFIWNDLLSLETGSLKLANGRVIEKTLYNRRTRQDEPALFVALTFERREVLDSSNIKPMNLIGVDRGENIPAVIALTDPEGCPLSRFKDSLGNPTHILRIGESYKEKQRTIQAKKEVEQRRAGGYSRKYASKAKNLADDMVRNTARDLLYYAVTQDAMLIFENLSRGFGRQGKRTFMAERQYTRMEDWLTAKLAYEGLPSKTYLSKTLAQYTISKTCSNCGFTITSADYDRVLEKLKKTATGWMTTINGKELKVEGQITYYNRYKRQNVVKDLSVELDRLSEESVNNDISSWTKGRSGEALSLLKKRFSHRPVQEKFVCLNCGFETHADEQAALNIARSWLFLRSQEYKKYQTNKTTGNTDKRAFVETWQSFYRKKLKEVWKPAV

SEQ ID NO: 43854 - protein, 978 aa, Artificial Sequence
  CasX Variant
QEIKRINKIRRRLVKDSNTKKAGKTGPMKTLLVRVMTPDLRERLENLRKKPENIPQPISNTSRANLNKLLTDYTEMKKAILHVYWEEFQKDPVGLMSRVAQPASKKIDQNKLKPEMDEKGNLTTAGFACSQCGQPLFVYKLEQVSEKGKAYTNYFGRCNVAEHEKLILLAQLKPEKDSDEAVTYSLGKFGQRALDFYSIHVTKESTHPVKPLAQIAGNRYASGPVGKALSDACMGTIASFLSKYQDIIIEHQKVVKGNQKRLESLRELAGKENLEYPSVTLPPQPHTKEGVDAYNEVIARVRMWVNLNLWQKLKLSRDDAKPLLRLKGFPSFPLVERQANEVDWWDMVCNVKKLINEKKEDGKVFWQNLAGYKRQEALRPYLSSEEDRKKGKKFARYQLGDLLLHLEKKHGEDWGKVYDEAWERIDKKVEGLSKHIKLEEERRSEDAQSKAALTDWLRAKASFVIEGLKEADKDEFCRCELKLQKWYGDLRGKPFAIEAENSILDISGFSKQYNCAFIWQKDGVKKLNLYLIINYFKGGKLRFKKIKPEAFEANRFYTVINKKSGEIVPMEVNFNFDDPNLIILPLAFGKRQGREFIWNDLLSLETGSLKLANGRVIEKTLYNRRTRQDEPALFVALTFERREVLDSSNIKPMNLIGVDRGENIPAVIALTDPEGCPLSRFKDSLGNPTHILRIGESYKEKQRTIQAKKEVEQRRAGGYSRKYASKAKNLADDMVRNTARDLLYYAVTQDAMLIFENLSRGFGRQGKRTFMAERQYTRMEDWLTAKLAYEGLPSKTYLSKTLAQYTSKTKSNCGFTITSADYDRVLEKLKKTATGWMTTINGKELKVEGQITYYNRYKRQNVVKDLSVELDRLSEESVNNDISSWTKGRSGEALSLLKKRFSHRPVQEKFVCLNCGFETHADEQAALNIARSWLFLRSQEYKKYQTNKTTGNTDKRAFVETWQSFYRKKLKEVWKPAV

SEQ ID NO: 43855 - protein, 978 aa, Artificial Sequence
  CasX Variant
QEIKRINKIRRRLVKDSNTKKAGKTGPMKTLLVRVMTPDLRERLENLRKKPENIPQPISNTSRANLNKLLTDYTEMKKAILHVYWEEFQKDPVGLMSRVAQPASKKIDQNKLKPEMDEKGNLTTAGFACSQCGQPLFVYKLEQVSEKGKAYTNYFGRCNVAEHEKLILLAQLKPEKDSDEAVTYSLGKFGQRALDFYSIHVTKESTHPVKPLAQIAGNRYASGPVGKALSDACMGTIASFLSKYQDIIIEHQKVVKGNQKRLESLRELAGKENLEYPSVTLPPQPHTKEGVDAYNEVIARVRMWVNLNLWQKLKLSRDDAKPLLRLKGFPSFPLVERQANEVDWWDMVCNVKKLINEKKEDGKVFWQNLAGYKRQEALRPYLSSEEDRKKGKKFARYQLGDLLLHLEKKHGEDWGKVYDEAWERIDKKVEGLSKHIKLEEERRSEDAQSKAALTDWLRAKASFVIEGLKEADKDEFCRCELKLQKWYGDLRGKPFAIEAENSILDISGFSKQYNCAFIWQKDGVKKLNLYLIINYFKGGKLRFKKIKPEAFEANRFYTVINKKSGEIVPMEVNFNFDDPNLIILPLAFGKRQGREFIWNDLLSLETGSLKLANGRVIEKTLYNRRTRQDEPALFVALTFERREVLDSSNIKPMNLIGVDRGENIPAVIALTDPEGCPLSRFKDSLGNPTHILRIGESYKEKQRTIQAKKEVEQRRAGGYSRKYASKAKNLADDMVRNTARDLLYYAVTQDAMLIFENLSRGFGRQGKRTFMAERQYTRMEDWLTAKLAYEGLPSKTYLSKQLAQYTSKTCSNCGFTITSADYDRVLEKLKKTATGWMTTINGKELKVEGQITYYNRYKRQNVVKDLSVELDRLSEESVNNDISSWTKGRSGEALSLLKKRFSHRPVQEKFVCLNCGFETHADEQAALNIARSWLFLRSQEYKKYQTNKTTGNTDKRAFVETWQSFYRKKLKEVWKPAV

SEQ ID NO: 43856 - protein, 978 aa, Artificial Sequence
  CasX Variant
QEIKRINKIRRRLVKDSNTKKAGKTGPMKTLLVRVMTPDLRERLENLRKKPENIPQPISNTSRANLNKLLTDYTEMKKAILHVYWEEFQKDPVGLMSRVAQPASKKIDQNKLKPEMDEKGNLTTAGFACSQCGQPLFVYKLEQVSEKGKAYTNYFGRCNVAEHEKLILLAQLKPEKDSDEAVTYSLGKFGQRALDFYSIHVTKESTHPVKPLAQIAGNRYASGPVGKALSDACMGTIASFLSKYQDIIIEHQKVVKGNQKRLESLRELAGKENLEYPSVTLPPQPHTKEGVDAYNEVIARVRMWVNLNLWQKLKLSRDDAKPLLRLKGFPSFPLVERQANEVDWWDMVCNVKKLINEKKEDGKVFWQNLAGYKRQEALRPYLSSEEDRKKGKKFARYQLGDLLLHLEKKHGEDWGKVYDEAWERIDKKVEGLSKHIKLEEERRSEDAQSKAALTDWLRAKASFVIEGLKEADKDEFCRCELKLQKWYGDLRGKPFAIEAENSILDISGFSKQYNCAFIWQKDGVKKLNLYLIINYFKGGKLRFKKIKPEAFEANRFYTVINKKSGEIVPMEVNFNFDDPNLIILPLAFGKRQGREFIWNDLLSLETGSLKLANGRVIEKTLYNRRTRQDEPALFVALTFERREVLDSSNIKPMNLIGVDRGENIPAVIALTDPEGCPLSRFKDSLGNPTHILRIGESYKEKQRTIQAKKEVEQRRAGGYSRKYASKAKNLADDMVRNTARDLLYYAVTQDAMLIFENLSRGFGRQGKRTFMAERQYTRMEDWLTAKLAYEGLPSKTYLSKTLAQYYSKTCSNCGFTITSADYDRVLEKLKKTATGWMTTINGKELKVEGQITYYNRYKRQNVVKDLSVELDRLSEESVNNDISSWTKGRSGEALSLLKKRFSHRPVQEKFVCLNCGFETHADEQAALNIARSWLFLRSQEYKKYQTNKTTGNTDKRAFVETWQSFYRKKLKEVWKPAV

SEQ ID NO: 43857 - protein, 978 aa, Artificial Sequence
  CasX Variant
QEIKRINKIRRRLVKDSNTKKAGKTGPMKTLLVRVMTPDLRERLENLRKKPENIPQPISNTSRANLNKLLTDYTEMKKAILHVYWEEFQKDPVGLMSRVAQPASKKIDQNKLKPEMDEKGNLTTAGFACSQCGQPLFVYKLEQVSEKGKAYTNYFGRCNVAEHEKLILLAQLKPEKDSDEAVTYSLGKFGQRALDFYSIHVTKESTHPVKPLAQIAGNRYASGPVGKALSDACMGTIASFLSKYQDIIIEHQKVVKGNQKRLESLRELAGKENLEYPSVTLPPQPHTKEGVDAYNEVIARVRMWVNLNLWQKLKLSRDDAKPLLRLKGFPSFPLVERQANEVDWWDMVCNVKKLINEKKEDGKVFWQNLAGYKRQEALRPYLSSEEDRKKGKKFARYQLGDLLLHLEKKHGEDWGKVYDEAWERIDKKVEGLSKHIKLEEERRSEDAQSKAALTDWLRAKASFVIEGLKEADKDEFCRCELKLQKWYGDLRGKPFAIEAENSILDISGFSKQYNCAFIWQKDGVKKLNLYLIINYFKGGKLRFKKIKPEAFEANRFYTVINKKSGEIVPMEVNFNFDDPNLIILPLAFGKRQGREFIWNDLLSLETGSLKLANGRVIEKTLYNRRTRQDEPALFVALTFERREVLDSSNIKPMNLIGVDRGENIPAVIALTDPEGCPLSRFKDSLGNPTHILRIGESYKEKQRTIQAKKEVEQRRAGGYSRKYASKAKNLADDMVRNTARDLLYYAVTQDAMLIFENLSRGFGRQGKRTFMAERQYTRMEDWLTAKLAYEGLPSKTYLSKTLAKYTSKTCSNCGFTITSADYDRVLEKLKKTATGWMTTINGKELKVEGQITYYNRYKRQNVVKDLSVELDRLSEESVNNDISSWTKGRSGEALSLLKKRFSHRPVQEKFVCLNCGFETHADEQAALNIARSWLFLRSQEYKKYQTNKTTGNTDKRAFVETWQSFYRKKLKEVWKPAV

SEQ ID NO: 43858 - protein, 978 aa, Artificial Sequence
  CasX Variant
QEIKRINKIRRRLVKDSNTKKAGKTGPMKTLLVRVMTPDLRERLENLRKKPENIPQPISNTSRANLNKLLTDYTEMKKAILHVYWEEFQKDPVGLMSRVAQPASKKIDQNKLKPEMDEKGNLTTAGFACSQCGQPLFVYKLEQVSEKGKAYTNYFGRCNVAEHEKLILLAQLKPEKDSDEAVTYSLGKFGQRALDFYSIHVTKESTHPVKPLAQIAGNRYASGPVGKALSDACMGTIASFLSKYQDIIIEHQKVVKGNQKRLESLRELAGKENLEYPSVTLPPQPHTKEGVDAYNEVIARVRMWVNLNLWQKLKLSRDDAKPLLRLKGFPSFPLVERQANEVDWWDMVCNVKKLINEKKEDGKVFWQNLAGYKRQEALRPYLSSEEDRKKGKKFARYQLGDLLLHLEKKHGEDWGKVYDEAWERIDKKVEGLSKHIKLEEERRSEDAQSKAALTDWLRAKASFVIEGLKEADKDEFCRCELKLQKWYGDLRGKPFAIEAENSILDISGFSKQYNCAFIWQKDGVKKLNLYLIINYFKGGKLRFKKIKPEAFEANRFYTVINKKSGEIVPMEVNFNFDDPNLIILPLAFGKRQGREFIWNDLLSLETGSLKLANGRVIEKTLYNRRTRQDEPALFVALTFERREVLDSSNIKPMNLIGVDRGENIPAVIALTDPEGCPLSRFKDSLGNPTHILRIGESYKEKQRTIQAKKEVEQRRAGGYSRKYASKAKNLADDMVRNTARDLLYYAVTQDAMLIFENLSRGFGRQGKRTFMAERQYTRMEDWLTAKLAYEGLASKTYLSKTLAQYTSKTCSNCGFTITSADYDRVLEKLKKTATGWMTTINGKELKVEGQITYYNRYKRQNVVKDLSVELDRLSEESVNNDISSWTKGRSGEALSLLKKRFSHRPVQEKFVCLNCGFETHADEQAALNIARSWLFLRSQEYKKYQTNKTTGNTDKRAFVETWQSFYRKKLKEVWKPAV

SEQ ID NO: 43859 - protein, 979 aa, Artificial Sequence
  CasX Variant
QEIKRINKIRRRLVKDSNTKKAGKTGPMKTLLVRVMTPDLRERLENLRKKPENIPQPISNTSRANLNKLLTDYTEMKKAILHVYWEEFQKDPVGLMSRVAQPASKKIDQNKLKPEMDEKGNLTTAGFACSQCGQPLFVYKLEQVSEKGKAYTNYFGRCNVAEHEKLILLAQLKPEKDSDEAVTYSLGKFGQRALDFYSIHVTKESTHPVKPLAQIAGNRYASGPVGKALSDACMGTIASFLSKYQDIIIEHQKVVKGNQKRLESLRELAGKENLEYPSVTLPPQPHTKEGVDAYNEVIARVRMWVNLNLWQKLKLSRDDAKPLLRLKGFPSFPLVERQANEVDWWDMVCNVKKLINEKKEDGKVFWQNLAGYKRQEALRPYLSSEEDRKKGKKFARYQLGDLLLHLEKKHGEDWGKVYDEAWERIDKKVEGLSKHIKLEEERRSEDAQSKAALTDWLRAKASFVIEGLKEADKDEFCRCELKLQKWYGDLRGKPFAIEAENSILDISGFSKQYNCAFIWQKDGVKKLNLYLIINYFKGGKLRFKKIKPEAFEANRFYTVINKKSGEIVPMEVNFNFDDPNLIILPLAFGKRQGREFIWNDLLSLETGSLKLANGRVIEKTLYNRRTRQDEPALFVALTFERREVLDSSNIKPMNLIGVDRGENIPAVIALTDPEGCPLSRFKDSLGNPTHILRIGESYKEKQRTIQAKKEVEQRRAGGYSRKYASKAKNLADDMVRNTARDLLYYAVTQDAMLIFENLSRGFGRQGKRTFMAERQYTRMEDWLTAKLAYEGLPSKTYLSKTLLAQYTSKTCSNCGFTITSADYDRVLEKLKKTATGWMTTINGKELKVEGQITYYNRYKRQNVVKDLSVELDRLSEESVNNDISSWTKGRSGEALSLLKKRFSHRPVQEKFVCLNCGFETHADEQAALNIARSWLFLRSQEYKKYQTNKTTGNTDKRAFVETWQSFYRKKLKEVWKPAV

SEQ ID NO: 43860 - protein, 977 aa, Artificial Sequence
  CasX Variant
QEIKRINKIRRRLVKDSNTKKAGKTGPMKTLLVRVMTPDLRERLENLRKKPENIPQPISNTSRANLNKLLTDYTEMKKAILHVYWEEFQKDPVGLMSRVAQPASKKIDQNKLKPEMDEKGNLTTAGFACSQCGQPLFVYKLEQVSEKGKAYTNYFGRCNVAEHEKLILLAQLKPEKDSDEAVTYSLGKFGQRALDFYSIHVTKESTHPVKPLAQIAGNRYASGPVGKALSDACMGTIASFLSKYQDIIIEHQKVVKGNQKRLESLRELAGKENLEYPSVTLPPQPHTKEGVDAYNEVIARVRMWVNLNLWQKLKLSRDDAKPLLRLKGFPSFPLVERQANEVDWWDMVCNVKKLINEKKEDGKVFWQNLAGYKRQEALRPYLSSEEDRKKGKKFARYQLGDLLLHLEKKHGEDWGKVYDEAWERIDKKVEGLSKHIKLEEERRSEDAQSKAALTDWLRAKASFVIEGLKEADKDEFCRCELKLQKWYGDLRGKPFAIEAENSILDISGFSKQYNCAFIWQKDGVKKLNLYLIINYFKGGKLRFKKIKPEAFEANRFYTVINKKSGEIVPMEVNFNFDDPNLIILPLAFGKRQGREFIWNDLLSLETGSLKLANGRVIEKTLYNRRTRQDEPALFVALTFERREVLDSSNIKPMNLIGVDRGENIPAVIALTDPEGCPLSRFKDSLGNPTHILRIGESYKEKQRTIQAKKEVEQRRAGGYSRKYASKAKNLADDMVRNTARDLLYYAVTQDAMLIFENLSRGFGRQGKRTFMAERQYTRMEDWLTAKLAYEGLPSKTYLSKTAQYTSKTCSNCGFTITSADYDRVLEKLKKTATGWMTTINGKELKVEGQITYYNRYKRQNVVKDLSVELDRLSEESVNNDISSWTKGRSGEALSLLKKRFSHRPVQEKFVCLNCGFETHADEQAALNIARSWLFLRSQEYKKYQTNKTTGNTDKRAFVETWQSFYRKKLKEVWKPAV

SEQ ID NO: 43861 - protein, 979 aa, Artificial Sequence
  CasX Variant
QEIKRINKIRRRLVKDSNTKKAGKTGPMKTLLVRVMTPDLRERLENLRKKPENIPQPISNTSRANLNKLLTDYTEMKKAILHVYWEEFQKDPVGLMSRVAQPASKKIDQNKLKPEMDEKGNLTTAGFACSQCGQPLFVYKLEQVSEKGKAYTNYFGRCNVAEHEKLILLAQLKPEKDSDEAVTYSLGKFGQRALDFYSIHVTKESTHPVKPLAQIAGNRYASGPVGKALSDACMGTIASFLSKYQDIIIEHQKVVKGNQKRLESLRELAGKENLEYPSVTLPPQPHTKEGVDAYNEVIARVRMWVNLNLWQKLKLSRDDAKPLLRLKGFPSFPLVERQANEVDWWDMVCNVKKLINEKKEDGKVFWQNLAGYKRQEALRPYLSSEEDRKKGKKFARYQLGDLLLHLEKKHGEDWGKVYDEAWERIDKKVEGLSKHIKLEEERRSEDAQSKAALTDWLRAKASFVIEGLKEADKDEFCRCELKLQKWYGDLRGKPFAIEAENSILDISGFSKQYNCAFIWQKDGVKKLNLYLIINYFKGGKLRFKKIKPEAFEANRFYTVINKKSGEIVPMEVNFNFDDPNLIILPLAFGKRQGREFIWNDLLSLETGSLKLANGRVIEKTLYNRRTRQDEPALFVALTFERREVLDSSNIKPMNLIGVDRGENIPAVIALTDPEGCPLSRFKDSLGNPTHILRIGESYKEKQRTIQAKKEVEQRRAGGYSRKYASKAKNLADDMVRNTARDLLYYAVTQDAMLIFENLSRGFGRQGKRTFMAERQYTRMEDWLTAKLAYEGLPSKTYLSKTLAQYTSKTCSNCGFTWITSADYDRVLEKLKKTATGWMTTINGKELKVEGQITYYNRYKRQNVVKDLSVELDRLSEESVNNDISSWTKGRSGEALSLLKKRFSHRPVQEKFVCLNCGFETHADEQAALNIARSWLFLRSQEYKKYQTNKTTGNTDKRAFVETWQSFYRKKLKEVWKPAV

SEQ ID NO: 43862 - protein, 979 aa, Artificial Sequence
  CasX Variant
QEIKRINKIRRRLVKDSNTKKAGKTGPMKTLLVRVMTPDLRERLENLRKKPENIPQPISNTSRANLNKLLTDYTEMKKAILHVYWEEFQKDPVGLMSRVAQPASKKIDQNKLKPEMDEKGNLTTAGFACSQCGQPLFVYKLEQVSEKGKAYTNYFGRCNVAEHEKLILLAQLKPEKDSDEAVTYSLGKFGQRALDFYSIHVTKESTHPVKPLAQIAGNRYASGPVGKALSDACMGTIASFLSKYQDIIIEHQKVVKGNQKRLESLRELAGKENLEYPSVTLPPQPHTKEGVDAYNEVIARVRMWVNLNLWQKLKLSRDDAKPLLRLKGFPSFPLVERQANEVDWWDMVCNVKKLINEKKEDGKVFWQNLAGYKRQEALRPYLSSEEDRKKGKKFARYQLGDLLLHLEKKHGEDWGKVYDEAWERIDKKVEGLSKHIKLEEERRSEDAQSKAALTDWLRAKASFVIEGLKEADKDEFCRCELKLQKWYGDLRGKPFAIEAENSILDISGFSKQYNCAFIWQKDGVKKLNLYLIINYFKGGKLRFKKIKPEAFEANRFYTVINKKSGEIVPMEVNFNFDDPNLIILPLAFGKRQGREFIWNDLLSLETGSLKLANGRVIEKTLYNRRTRQDEPALFVALTFERREVLDSSNIKPMNLIGVDRGENIPAVIALTDPEGCPLSRFKDSLGNPTHILRIGESYKEKQRTIQAKKEVEQRRAGGYSRKYASKAKNLADDMVRNTARDLLYYAVTQDAMLIFENLSRGFGRQGKRTFMAERQYTRMEDWLTAKLAYEGLPSKTYLSKHTLAQYTSKTCSNCGFTITSADYDRVLEKLKKTATGWMTTINGKELKVEGQITYYNRYKRQNVVKDLSVELDRLSEESVNNDISSWTKGRSGEALSLLKKRFSHRPVQEKFVCLNCGFETHADEQAALNIARSWLFLRSQEYKKYQTNKTTGNTDKRAFVETWQSFYRKKLKEVWKPAV

SEQ ID NO: 43863 - protein, 978 aa, Artificial Sequence
  CasX Variant
QEIKRINKIRRRLVKDSNTKKAGKTGPMKTLLVRVMTPDLRERLENLRKKPENIPQPISNTSRANLNKLLTDYTEMKKAILHVYWEEFQKDPVGLMSRVAQPASKKIDQNKLKPEMDEKGNLTTAGFACSQCGQPLFVYKLEQVSEKGKAYTNYFGRCNVAEHEKLILLAQLKPEKDSDEAVTYSLGKFGQRALDFYSIHVTKESTHPVKPLAQIAGNRYASGPVGKALSDACMGTIASFLSKYQDIIIEHQKVVKGNQKRLESLRELAGKENLEYPSVTLPPQPHTKEGVDAYNEVIARVRMWVNLNLWQKLKLSRDDAKPLLRLKGFPSFPLVERQANEVDWWDMVCNVKKLINEKKEDGKVFWQNLAGYKRQEALRPYLSSEEDRKKGKKFARYQLGDLLLHLEKKHGEDWGKVYDEAWERIDKKVEGLSKHIKLEEERRSEDAQSKAALTDWLRAKASFVIEGLKEADKDEFCRCELKLQKWYGDLRGKPFAIEAENSILDISGFSKQYNCAFIWQKDGVKKLNLYLIINYFKGGKLRFKKIKPEAFEANRFYTVINKKSGEIVPMEVNFNFDDPNLIILPLAFGKRQGREFIWNDLLSLETGSLKLANGRVIEKTLYNRRTRQDEPALFVALTFERREVLDSSNIKPMNLIGVDRGENIPAVIALTDPEGCPLSRFKDSLGNPTHILRIGESYKEKQRTIQAKKEVEQRRAGGYSRKYASKAKNLADDMVRNTARDLLYYAVTQDAMLIFENLSRGFGRQGKRTFMAERQYTRMEDWLTAKLAYEGLPSKTYLSKTLAQYTSKPCSNCGFTITSADYDRVLEKLKKTATGWMTTINGKELKVEGQITYYNRYKRQNVVKDLSVELDRLSEESVNNDISSWTKGRSGEALSLLKKRFSHRPVQEKFVCLNCGFETHADEQAALNIARSWLFLRSQEYKKYQTNKTTGNTDKRAFVETWQSFYRKKLKEVWKPAV

SEQ ID NO: 43864 - protein, 979 aa, Artificial Sequence
  CasX Variant
QEIKRINKIRRRLVKDSNTKKAGKTGPMKTLLVRVMTPDLRERLENLRKKPENIPQPISNTSRANLNKLLTDYTEMKKAILHVYWEEFQKDPVGLMSRVAQPASKKIDQNKLKPEMDEKGNLTTAGFACSQCGQPLFVYKLEQVSEKGKAYTNYFGRCNVAEHEKLILLAQLKPEKDSDEAVTYSLGKFGQRALDFYSIHVTKESTHPVKPLAQIAGNRYASGPVGKALSDACMGTIASFLSKYQDIIIEHQKVVKGNQKRLESLRELAGKENLEYPSVTLPPQPHTKEGVDAYNEVIARVRMWVNLNLWQKLKLSRDDAKPLLRLKGFPSFPLVERQANEVDWWDMVCNVKKLINEKKEDGKVFWQNLAGYKRQEALRPYLSSEEDRKKGKKFARYQLGDLLLHLEKKHGEDWGKVYDEAWERIDKKVEGLSKHIKLEEERRSEDAQSKAALTDWLRAKASFVIEGLKEADKDEFCRCELKLQKWYGDLRGKPFAIEAENSILDISGFSKQYNCAFIWQKDGVKKLNLYLIINYFKGGKLRFKKIKPEAFEANRFYTVINKKSGEIVPMEVNFNFDDPNLIILPLAFGKRQGREFIWNDLLSLETGSLKLANGRVIEKTLYNRRTRQDEPALFVALTFERREVLDSSNIKPMNLIGVDRGENIPAVIALTDPEGCPLSRFKDSLGNPTHILRIGESYKEKQRTIQAKKEVEQRRAGGYSRKYASKAKNLADDMVRNTARDLLYYAVTQDAMLIFENLSRGFGRQGKRTFMAERQYTRMEDWLTAKLAYEGLPSKTYLSKTLAAQYTSKTCSNCGFTITSADYDRVLEKLKKTATGWMTTINGKELKVEGQITYYNRYKRQNVVKDLSVELDRLSEESVNNDISSWTKGRSGEALSLLKKRFSHRPVQEKFVCLNCGFETHADEQAALNIARSWLFLRSQEYKKYQTNKTTGNTDKRAFVETWQSFYRKKLKEVWKPAV

SEQ ID NO: 43865 - protein, 979 aa, Artificial Sequence
  CasX Variant
QEIKRINKIRRRLVKDSNTKKAGKTGPMKTLLVRVMTPDLRERLENLRKKPENIPQPISNTSRANLNKLLTDYTEMKKAILHVYWEEFQKDPVGLMSRVAQPASKKIDQNKLKPEMDEKGNLTTAGFACSQCGQPLFVYKLEQVSEKGKAYTNYFGRCNVAEHEKLILLAQLKPEKDSDEAVTYSLGKFGQRALDFYSIHVTKESTHPVKPLAQIAGNRYASGPVGKALSDACMGTIASFLSKYQDIIIEHQKVVKGNQKRLESLRELAGKENLEYPSVTLPPQPHTKEGVDAYNEVIARVRMWVNLNLWQKLKLSRDDAKPLLRLKGFPSFPLVERQANEVDWWDMVCNVKKLINEKKEDGKVFWQNLAGYKRQEALRPYLSSEEDRKKGKKFARYQLGDLLLHLEKKHGEDWGKVYDEAWERIDKKVEGLSKHIKLEEERRSEDAQSKAALTDWLRAKASFVIEGLKEADKDEFCRCELKLQKWYGDLRGKPFAIEAENSILDISGFSKQYNCAFIWQKDGVKKLNLYLIINYFKGGKLRFKKIKPEAFEANRFYTVINKKSGEIVPMEVNFNFDDPNLIILPLAFGKRQGREFIWNDLLSLETGSLKLANGRVIEKTLYNRRTRQDEPALFVALTFERREVLDSSNIKPMNLIGVDRGENIPAVIALTDPEGCPLSRFKDSLGNPTHILRIGESYKEKQRTIQAKKEVEQRRAGGYSRKYASKAKNLADDMVRNTARDLLYYAVTQDAMLIFENLSRGFGRQGKRTFMAERQYTRMEDWLTAKLAYEGLPSKTYLSKTLAQYTSKTCSNCGGFTITSADYDRVLEKLKKTATGWMTTINGKELKVEGQITYYNRYKRQNVVKDLSVELDRLSEESVNNDISSWTKGRSGEALSLLKKRFSHRPVQEKFVCLNCGFETHADEQAALNIARSWLFLRSQEYKKYQTNKTTGNTDKRAFVETWQSFYRKKLKEVWKPAV

SEQ ID NO: 43866 - protein, 979 aa, Artificial Sequence
  CasX Variant
QEIKRINKIRRRLVKDSNTKKAGKTGPMKTLLVRVMTPDLRERLENLRKKPENIPQPISNTSRANLNKLLTDYTEMKKAILHVYWEEFQKDPVGLMSRVAQPASKKIDQNKLKPEMDEKGNLTTAGFACSQCGQPLFVYKLEQVSEKGKAYTNYFGRCNVAEHEKLILLAQLKPEKDSDEAVTYSLGKFGQRALDFYSIHVTKESTHPVKPLAQIAGNRYASGPVGKALSDACMGTIASFLSKYQDIIIEHQKVVKGNQKRLESLRELAGKENLEYPSVTLPPQPHTKEGVDAYNEVIARVRMWVNLNLWQKLKLSRDDAKPLLRLKGFPSFPLVERQANEVDWWDMVCNVKKLINEKKEDGKVFWQNLAGYKRQEALRPYLSSEEDRKKGKKFARYQLGDLLLHLEKKHGEDWGKVYDEAWERIDKKVEGLSKHIKLEEERRSEDAQSKAALTDWLRAKASFVIEGLKEADKDEFCRCELKLQKWYGDLRGKPFAIEAENSILDISGFSKQYNCAFIWQKDGVKKLNLYLIINYFKGGKLRFKKIKPEAFEANRFYTVINKKSGEIVPMEVNFNFDDPNLIILPLAFGKRQGREFIWNDLLSLETGSLKLANGRVIEKTLYNRRTRQDEPALFVALTFERREVLDSSNIKPMNLIGVDRGENIPAVIALTDPEGCPLSRFKDSLGNPTHILRIGESYKEKQRTIQAKKEVEQRRAGGYSRKYASKAKNLADDMVRNTARDLLYYAVTQDAMLIFENLSRGFGRQGKRTFMAERQYTRMEDWLTAKLAYEGLPSKTYLSKTLFAQYTSKTCSNCGFTITSADYDRVLEKLKKTATGWMTTINGKELKVEGQITYYNRYKRQNVVKDLSVELDRLSEESVNNDISSWTKGRSGEALSLLKKRFSHRPVQEKFVCLNCGFETHADEQAALNIARSWLFLRSQEYKKYQTNKTTGNTDKRAFVETWQSFYRKKLKEVWKPAV

SEQ ID NO: 43867 - protein, 979 aa, Artificial Sequence
  CasX Variant
QEIKRINKIRRRLVKDSNTKKAGKTGPMKTLLVRVMTPDLRERLENLRKKPENIPQPISNTSRANLNKLLTDYTEMKKAILHVYWEEFQKDPVGLMSRVAQPASKKIDQNKLKPEMDEKGNLTTAGFACSQCGQPLFVYKLEQVSEKGKAYTNYFGRCNVAEHEKLILLAQLKPEKDSDEAVTYSLGKFGQRALDFYSIHVTKESTHPVKPLAQIAGNRYASGPVGKALSDACMGTIASFLSKYQDIIIEHQKVVKGNQKRLESLRELAGKENLEYPSVTLPPQPHTKEGVDAYNEVIARVRMWVNLNLWQKLKLSRDDAKPLLRLKGFPSFPLVERQANEVDWWDMVCNVKKLINEKKEDGKVFWQNLAGYKRQEALRPYLSSEEDRKKGKKFARYQLGDLLLHLEKKHGEDWGKVYDEAWERIDKKVEGLSKHIKLEEERRSEDAQSKAALTDWLRAKASFVIEGLKEADKDEFCRCELKLQKWYGDLRGKPFAIEAENSILDISGFSKQYNCAFIWQKDGVKKLNLYLIINYFKGGKLRFKKIKPEAFEANRFYTVINKKSGEIVPMEVNFNFDDPNLIILPLAFGKRQGREFIWNDLLSLETGSLKLANGRVIEKTLYNRRTRQDEPALFVALTFERREVLDSSNIKPMNLIGVDRGENIPAVIALTDPEGCPLSRFKDSLGNPTHILRIGESYKEKQRTIQAKKEVEQRRAGGYSRKYASKAKNLADDMVRNTARDLLYYAVTQDAMLIFENLSRGFGRQGKRTFMAERQYTRMEDWLTAKLAYEGLPSKTYLSKTLAQYTSKNTCSNCGFTITSADYDRVLEKLKKTATGWMTTINGKELKVEGQITYYNRYKRQNVVKDLSVELDRLSEESVNNDISSWTKGRSGEALSLLKKRFSHRPVQEKFVCLNCGFETHADEQAALNIARSWLFLRSQEYKKYQTNKTTGNTDKRAFVETWQSFYRKKLKEVWKPAV

SEQ ID NO: 43868 - protein, 978 aa, Artificial Sequence
  CasX Variant
QEIKRINKIRRRLVKDSNTKKAGKTGPMKTLLVRVMTPDLRERLENLRKKPENIPQPISNTSRANLNKLLTDYTEMKKAILHVYWEEFQKDPVGLMSRVAQPASKKIDQNKLKPEMDEKGNLTTAGFACSQCGQPLFVYKLEQVSEKGKAYTNYFGRCNVAEHEKLILLAQLKPEKDSDEAVTYSLGKFGQRALDFYSIHVTKESTHPVKPLAQIAGNRYASGPVGKALSDACMGTIASFLSKYQDIIIEHQKVVKGNQKRLESLRELAGKENLEYPSVTLPPQPHTKEGVDAYNEVIARVRMWVNLNLWQKLKLSRDDAKPLLRLKGFPSFPLVERQANEVDWWDMVCNVKKLINEKKEDGKVFWQNLAGYKRQEALRPYLSSEEDRKKGKKFARYQLGDLLLHLEKKHGEDWGKVYDEAWERIDKKVEGLSKHIKLEEERRSEDAQSKAALTDWLRAKASFVIEGLKEADKDEFCRCELKLQKWYGDLRGKPFAIEAENSILDISGFSKQYNCAFIWQKDGVKKLNLYLIINYFKGGKLRFKKIKPEAFEANRFYTVINKKSGEIVPMEVNFNFDDPNLIILPLAFGKRQGREFIWNDLLSLETGSLKLANGRVIEKTLYNRRTRQDEPALFVALTFERREVLDSSNIKPMNLIGVDRGENIPAVIALTDPEGCPLSRFKDSLGNPTHILRIGESYKEKQRTIQAKKEVEQRRAGGYSRKYASKAKNLADDMVRNTARDLLYYAVTQDAMLIFENLSRGFGRQGKRTFMAERQYTRMEDWLTAKLAYEGLPSKTYLSKTLAQYTSKTCSNCGPTITSADYDRVLEKLKKTATGWMTTINGKELKVEGQITYYNRYKRQNVVKDLSVELDRLSEESVNNDISSWTKGRSGEALSLLKKRFSHRPVQEKFVCLNCGFETHADEQAALNIARSWLFLRSQEYKKYQTNKTTGNTDKRAFVETWQSFYRKKLKEVWKPAV

SEQ ID NO: 43869 - protein, 979 aa, Artificial Sequence
  CasX Variant
QEIKRINKIRRRLVKDSNTKKAGKTGPMKTLLVRVMTPDLRERLENLRKKPENIPQPISNTSRANLNKLLTDYTEMKKAILHVYWEEFQKDPVGLMSRVAQPASKKIDQNKLKPEMDEKGNLTTAGFACSQCGQPLFVYKLEQVSEKGKAYTNYFGRCNVAEHEKLILLAQLKPEKDSDEAVTYSLGKFGQRALDFYSIHVTKESTHPVKPLAQIAGNRYASGPVGKALSDACMGTIASFLSKYQDIIIEHQKVVKGNQKRLESLRELAGKENLEYPSVTLPPQPHTKEGVDAYNEVIARVRMWVNLNLWQKLKLSRDDAKPLLRLKGFPSFPLVERQANEVDWWDMVCNVKKLINEKKEDGKVFWQNLAGYKRQEALRPYLSSEEDRKKGKKFARYQLGDLLLHLEKKHGEDWGKVYDEAWERIDKKVEGLSKHIKLEEERRSEDAQSKAALTDWLRAKASFVIEGLKEADKDEFCRCELKLQKWYGDLRGKPFAIEAENSILDISGFSKQYNCAFIWQKDGVKKLNLYLIINYFKGGKLRFKKIKPEAFEANRFYTVINKKSGEIVPMEVNFNFDDPNLIILPLAFGKRQGREFIWNDLLSLETGSLKLANGRVIEKTLYNRRTRQDEPALFVALTFERREVLDSSNIKPMNLIGVDRGENIPAVIALTDPEGCPLSRFKDSLGNPTHILRIGESYKEKQRTIQAKKEVEQRRAGGYSRKYASKAKNLADDMVRNTARDLLYYAVTQDAMLIFENLSRGFGRQGKRTFMAERQYTRMEDWLTAKLAYEGLPSKTYLSKTWLAQYTSKTCSNCGFTITSADYDRVLEKLKKTATGWMTTINGKELKVEGQITYYNRYKRQNVVKDLSVELDRLSEESVNNDISSWTKGRSGEALSLLKKRFSHRPVQEKFVCLNCGFETHADEQAALNIARSWLFLRSQEYKKYQTNKTTGNTDKRAFVETWQSFYRKKLKEVWKPAV

SEQ ID NO: 43870 - protein, 978 aa, Artificial Sequence
  CasX Variant
QEIKRINKIRRRLVKDSNTKKAGKTGPMKTLLVRVMTPDLRERLENLRKKPENIPQPISNTSRANLNKLLTDYTEMKKAILHVYWEEFQKDPVGLMSRVAQPASKKIDQNKLKPEMDEKGNLTTAGFACSQCGQPLFVYKLEQVSEKGKAYTNYFGRCNVAEHEKLILLAQLKPEKDSDEAVTYSLGKFGQRALDFYSIHVTKESTHPVKPLAQIAGNRYASGPVGKALSDACMGTIASFLSKYQDIIIEHQKVVKGNQKRLESLRELAGKENLEYPSVTLPPQPHTKEGVDAYNEVIARVRMWVNLNLWQKLKLSRDDAKPLLRLKGFPSFPLVERQANEVDWWDMVCNVKKLINEKKEDGKVFWQNLAGYKRQEALRPYLSSEEDRKKGKKFARYQLGDLLLHLEKKHGEDWGKVYDEAWERIDKKVEGLSKHIKLEEERRSEDAQSKAALTDWLRAKASFVIEGLKEADKDEFCRCELKLQKWYGDLRGKPFAIEAENSILDISGFSKQYNCAFIWQKDGVKKLNLYLIINYFKGGKLRFKKIKPEAFEANRFYTVINKKSGEIVPMEVNFNFDDPNLIILPLAFGKRQGREFIWNDLLSLETGSLKLANGRVIEKTLYNRRTRQDEPALFVALTFERREVLDSSNIKPMNLIGVDRGENIPAVIALTDPEGCPLSRFKDSLGNPTHILRIGESYKEKQRTIQAKKEVEQRRAGGYSRKYASKAKNLADDMVRNTARDLLYYAVTQDAMLIFENLSRGFGRQGKRTFMAERQYTRMEDWLTAKLAYEGLPSKTYLSKTLAQYTSKTMSNCGFTITSADYDRVLEKLKKTATGWMTTINGKELKVEGQITYYNRYKRQNVVKDLSVELDRLSEESVNNDISSWTKGRSGEALSLLKKRFSHRPVQEKFVCLNCGFETHADEQAALNIARSWLFLRSQEYKKYQTNKTTGNTDKRAFVETWQSFYRKKLKEVWKPAV

SEQ ID NO: 43871 - protein, 977 aa, Artificial Sequence
  CasX Variant
QEIKRINKIRRRLVKDSNTKKAGKTGPMKTLLVRVMTPDLRERLENLRKKPENIPQPISNTSRANLNKLLTDYTEMKKAILHVYWEEFQKDPVGLMSRVAQPASKKIDQNKLKPEMDEKGNLTTAGFACSQCGQPLFVYKLEQVSEKGKAYTNYFGRCNVAEHEKLILLAQLKPEKDSDEAVTYSLGKFGQRALDFYSIHVTKESTHPVKPLAQIAGNRYASGPVGKALSDACMGTIASFLSKYQDIIIEHQKVVKGNQKRLESLRELAGKENLEYPSVTLPPQPHTKEGVDAYNEVIARVRMWVNLNLWQKLKLSRDDAKPLLRLKGFPSFPLVERQANEVDWWDMVCNVKKLINEKKEDGKVFWQNLAGYKRQEALRPYLSSEEDRKKGKKFARYQLGDLLLHLEKKHGEDWGKVYDEAWERIDKKVEGLSKHIKLEEERRSEDAQSKAALTDWLRAKASFVIEGLKEADKDEFCRCELKLQKWYGDLRGKPFAIEAENSILDISGFSKQYNCAFIWQKDGVKKLNLYLIINYFKGGKLRFKKIKPEAFEANRFYTVINKKSGEIVPMEVNFNFDDPNLIILPLAFGKRQGREFIWNDLLSLETGSLKLANGRVIEKTLYNRRTRQDEPALFVALTFERREVLDSSNIKPMNLIGVDRGENIPAVIALTDPEGCPLSRFKDSLGNPTHILRIGESYKEKQRTIQAKKEVEQRRAGGYSRKYASKAKNLADDMVRNTARDLLYYAVTQDAMLIFENLSRGFGRQGKRTFMAERQYTRMEDWLTAKLAYEGLPSKTYLSKTLAQYTSKTCSCGFTITSADYDRVLEKLKKTATGWMTTINGKELKVEGQITYYNRYKRQNVVKDLSVELDRLSEESVNNDISSWTKGRSGEALSLLKKRFSHRPVQEKFVCLNCGFETHADEQAALNIARSWLFLRSQEYKKYQTNKTTGNTDKRAFVETWQSFYRKKLKEVWKPAV

SEQ ID NO: 43872 - protein, 979 aa, Artificial Sequence
  CasX Variant
QEIKRINKIRRRLVKDSNTKKAGKTGPMKTLLVRVMTPDLRERLENLRKKPENIPQPISNTSRANLNKLLTDYTEMKKAILHVYWEEFQKDPVGLMSRVAQPASKKIDQNKLKPEMDEKGNLTTAGFACSQCGQPLFVYKLEQVSEKGKAYTNYFGRCNVAEHEKLILLAQLKPEKDSDEAVTYSLGKFGQRALDFYSIHVTKESTHPVKPLAQIAGNRYASGPVGKALSDACMGTIASFLSKYQDIIIEHQKVVKGNQKRLESLRELAGKENLEYPSVTLPPQPHTKEGVDAYNEVIARVRMWVNLNLWQKLKLSRDDAKPLLRLKGFPSFPLVERQANEVDWWDMVCNVKKLINEKKEDGKVFWQNLAGYKRQEALRPYLSSEEDRKKGKKFARYQLGDLLLHLEKKHGEDWGKVYDEAWERIDKKVEGLSKHIKLEEERRSEDAQSKAALTDWLRAKASFVIEGLKEADKDEFCRCELKLQKWYGDLRGKPFAIEAENSILDISGFSKQYNCAFIWQKDGVKKLNLYLIINYFKGGKLRFKKIKPEAFEANRFYTVINKKSGEIVPMEVNFNFDDPNLIILPLAFGKRQGREFIWNDLLSLETGSLKLANGRVIEKTLYNRRTRQDEPALFVALTFERREVLDSSNIKPMNLIGVDRGENIPAVIALTDPEGCPLSRFKDSLGNPTHILRIGESYKEKQRTIQAKKEVEQRRAGGYSRKYASKAKNLADDMVRNTARDLLYYAVTQDAMLIFENLSRGFGRQGKRTFMAERQYTRMEDWLTAKLAYEGLPSKTYLSKTLAQYTSKTCSVNCGFTITSADYDRVLEKLKKTATGWMTTINGKELKVEGQITYYNRYKRQNVVKDLSVELDRLSEESVNNDISSWTKGRSGEALSLLKKRFSHRPVQEKFVCLNCGFETHADEQAALNIARSWLFLRSQEYKKYQTNKTTGNTDKRAFVETWQSFYRKKLKEVWKPAV

SEQ ID NO: 43873 - protein, 978 aa, Artificial Sequence
  CasX Variant
QEIKRINKIRRRLVKDSNTKKAGKTGPMKTLLVRVMTPDLRERLENLRKKPENIPQPISNTSRANLNKLLTDYTEMKKAILHVYWEEFQKDPVGLMSRVAQPASKKIDQNKLKPEMDEKGNLTTAGFACSQCGQPLFVYKLEQVSEKGKAYTNYFGRCNVAEHEKLILLAQLKPEKDSDEAVTYSLGKFGQRALDFYSIHVTKESTHPVKPLAQIAGNRYASGPVGKALSDACMGTIASFLSKYQDIIIEHQKVVKGNQKRLESLRELAGKENLEYPSVTLPPQPHTKEGVDAYNEVIARVRMWVNLNLWQKLKLSRDDAKPLLRLKGFPSFPLVERQANEVDWWDMVCNVKKLINEKKEDGKVFWQNLAGYKRQEALRPYLSSEEDRKKGKKFARYQLGDLLLHLEKKHGEDWGKVYDEAWERIDKKVEGLSKHIKLEEERRSEDAQSKAALTDWLRAKASFVIEGLKEADKDEFCRCELKLQKWYGDLRGKPFAIEAENSILDISGFSKQYNCAFIWQKDGVKKLNLYLIINYFKGGKLRFKKIKPEAFEANRFYTVINKKSGEIVPMEVNFNFDDPNLIILPLAFGKRQGREFIWNDLLSLETGSLKLANGRVIEKTLYNRRTRQDEPALFVALTFERREVLDSSNIKPMNLIGVDRGENIPAVIALTDPEGCPLSRFKDSLGNPTHILRIGESYKEKQRTIQAKKEVEQRRAGGYSRKYASKAKNLADDMVRNTARDLLYYAVTQDAMLIFENLSRGFGRQGKRTFMAERQYTRMEDWLTAKLAYEGLPSKTYLSKTLAQYTPKTCSNCGFTITSADYDRVLEKLKKTATGWMTTINGKELKVEGQITYYNRYKRQNVVKDLSVELDRLSEESVNNDISSWTKGRSGEALSLLKKRFSHRPVQEKFVCLNCGFETHADEQAALNIARSWLFLRSQEYKKYQTNKTTGNTDKRAFVETWQSFYRKKLKEVWKPAV

SEQ ID NO: 43874 - protein, 979 aa, Artificial Sequence
  CasX Variant
QEIKRINKIRRRLVKDSNTKKAGKTGPMKTLLVRVMTPDLRERLENLRKKPENIPQPISNTSRANLNKLLTDYTEMKKAILHVYWEEFQKDPVGLMSRVAQPASKKIDQNKLKPEMDEKGNLTTAGFACSQCGQPLFVYKLEQVSEKGKAYTNYFGRCNVAEHEKLILLAQLKPEKDSDEAVTYSLGKFGQRALDFYSIHVTKESTHPVKPLAQIAGNRYASGPVGKALSDACMGTIASFLSKYQDIIIEHQKVVKGNQKRLESLRELAGKENLEYPSVTLPPQPHTKEGVDAYNEVIARVRMWVNLNLWQKLKLSRDDAKPLLRLKGFPSFPLVERQANEVDWWDMVCNVKKLINEKKEDGKVFWQNLAGYKRQEALRPYLSSEEDRKKGKKFARYQLGDLLLHLEKKHGEDWGKVYDEAWERIDKKVEGLSKHIKLEEERRSEDAQSKAALTDWLRAKASFVIEGLKEADKDEFCRCELKLQKWYGDLRGKPFAIEAENSILDISGFSKQYNCAFIWQKDGVKKLNLYLIINYFKGGKLRFKKIKPEAFEANRFYTVINKKSGEIVPMEVNFNFDDPNLIILPLAFGKRQGREFIWNDLLSLETGSLKLANGRVIEKTLYNRRTRQDEPALFVALTFERREVLDSSNIKPMNLIGVDRGENIPAVIALTDPEGCPLSRFKDSLGNPTHILRIGESYKEKQRTIQAKKEVEQRRAGGYSRKYASKAKNLADDMVRNTARDLLYYAVTQDAMLIFENLSRGFGRQGKRTFMAERQYTRMEDWPLTAKLAYEGLPSKTYLSKTLAQYTSKTCSNCGFTITSADYDRVLEKLKKTATGWMTTINGKELKVEGQITYYNRYKRQNVVKDLSVELDRLSEESVNNDISSWTKGRSGEALSLLKKRFSHRPVQEKFVCLNCGFETHADEQAALNIARSWLFLRSQEYKKYQTNKTTGNTDKRAFVETWQSFYRKKLKEVWKPAV

SEQ ID NO: 43875 - protein, 979 aa, Artificial Sequence
  CasX Variant
QEIKRINKIRRRLVKDSNTKKAGKTGPMKTLLVRVMTPDLRERLENLRKKPENIPQPISNTSRANLNKLLTDYTEMKKAILHVYWEEFQKDPVGLMSRVAQPASKKIDQNKLKPEMDEKGNLTTAGFACSQCGQPLFVYKLEQVSEKGKAYTNYFGRCNVAEHEKLILLAQLKPEKDSDEAVTYSLGKFGQRALDFYSIHVTKESTHPVKPLAQIAGNRYASGPVGKALSDACMGTIASFLSKYQDIIIEHQKVVKGNQKRLESLRELAGKENLEYPSVTLPPQPHTKEGVDAYNEVIARVRMWVNLNLWQKLKLSRDDAKPLLRLKGFPSFPLVERQANEVDWWDMVCNVKKLINEKKEDGKVFWQNLAGYKRQEALRPYLSSEEDRKKGKKFARYQLGDLLLHLEKKHGEDWGKVYDEAWERIDKKVEGLSKHIKLEEERRSEDAQSKAALTDWLRAKASFVIEGLKEADKDEFCRCELKLQKWYGDLRGKPFAIEAENSILDISGFSKQYNCAFIWQKDGVKKLNLYLIINYFKGGKLRFKKIKPEAFEANRFYTVINKKSGEIVPMEVNFNFDDPNLIILPLAFGKRQGREFIWNDLLSLETGSLKLANGRVIEKTLYNRRTRQDEPALFVALTFERREVLDSSNIKPMNLIGVDRGENIPAVIALTDPEGCPLSRFKDSLGNPTHILRIGESYKEKQRTIQAKKEVEQRRAGGYSRKYASKAKNLADDMVRNTARDLLYYAVTQDAMLIFENLSRGFGRQGKRTFMAERQYTRMEDWLTAKLAYEGLPSKTYLSKTLAQYTSKTCMSNCGFTITSADYDRVLEKLKKTATGWMTTINGKELKVEGQITYYNRYKRQNVVKDLSVELDRLSEESVNNDISSWTKGRSGEALSLLKKRFSHRPVQEKFVCLNCGFETHADEQAALNIARSWLFLRSQEYKKYQTNKTTGNTDKRAFVETWQSFYRKKLKEVWKPAV

SEQ ID NO: 43876 - protein, 979 aa, Artificial Sequence
  CasX Variant
QEIKRINKIRRRLVKDSNTKKAGKTGPMKTLLVRVMTPDLRERLENLRKKPENIPQPISNTSRANLNKLLTDYTEMKKAILHVYWEEFQKDPVGLMSRVAQPASKKIDQNKLKPEMDEKGNLTTAGFACSQCGQPLFVYKLEQVSEKGKAYTNYFGRCNVAEHEKLILLAQLKPEKDSDEAVTYSLGKFGQRALDFYSIHVTKESTHPVKPLAQIAGNRYASGPVGKALSDACMGTIASFLSKYQDIIIEHQKVVKGNQKRLESLRELAGKENLEYPSVTLPPQPHTKEGVDAYNEVIARVRMWVNLNLWQKLKLSRDDAKPLLRLKGFPSFPLVERQANEVDWWDMVCNVKKLINEKKEDGKVFWQNLAGYKRQEALRPYLSSEEDRKKGKKFARYQLGDLLLHLEKKHGEDWGKVYDEAWERIDKKVEGLSKHIKLEEERRSEDAQSKAALTDWLRAKASFVIEGLKEADKDEFCRCELKLQKWYGDLRGKPFAIEAENSILDISGFSKQYNCAFIWQKDGVKKLNLYLIINYFKGGKLRFKKIKPEAFEANRFYTVINKKSGEIVPMEVNFNFDDPNLIILPLAFGKRQGREFIWNDLLSLETGSLKLANGRVIEKTLYNRRTRQDEPALFVALTFERREVLDSSNIKPMNLIGVDRGENIPAVIALTDPEGCPLSRFKDSLGNPTHILRIGESYKEKQRTIQAKKEVEQRRAGGYSRKYASKAKNLADDMVRNTARDLLYYAVTQDAMLIFENLSRGFGRQGKRTFMAERQYTRMEDWLTAKLARYEGLPSKTYLSKTLAQYTSKTCSNCGFTITSADYDRVLEKLKKTATGWMTTINGKELKVEGQITYYNRYKRQNVVKDLSVELDRLSEESVNNDISSWTKGRSGEALSLLKKRFSHRPVQEKFVCLNCGFETHADEQAALNIARSWLFLRSQEYKKYQTNKTTGNTDKRAFVETWQSFYRKKLKEVWKPAV

SEQ ID NO: 43877 - protein, 978 aa, Artificial Sequence
  CasX Variant
QEIKRINKIRRRLVKDSNTKKAGKTGPMKTLLVRVMTPDLRERLENLRKKPENIPQPISNTSRANLNKLLTDYTEMKKAILHVYWEEFQKDPVGLMSRVAQPASKKIDQNKLKPEMDEKGNLTTAGFACSQCGQPLFVYKLEQVSEKGKAYTNYFGRCNVAEHEKLILLAQLKPEKDSDEAVTYSLGKFGQRALDFYSIHVTKESTHPVKPLAQIAGNRYASGPVGKALSDACMGTIASFLSKYQDIIIEHQKVVKGNQKRLESLRELAGKENLEYPSVTLPPQPHTKEGVDAYNEVIARVRMWVNLNLWQKLKLSRDDAKPLLRLKGFPSFPLVERQANEVDWWDMVCNVKKLINEKKEDGKVFWQNLAGYKRQEALRPYLSSEEDRKKGKKFARYQLGDLLLHLEKKHGEDWGKVYDEAWERIDKKVEGLSKHIKLEEERRSEDAQSKAALTDWLRAKASFVIEGLKEADKDEFCRCELKLQKWYGDLRGKPFAIEAENSILDISGFSKQYNCAFIWQKDGVKKLNLYLIINYFKGGKLRFKKIKPEAFEANRFYTVINKKSGEIVPMEVNFNFDDPNLIILPLAFGKRQGREFIWNDLLSLETGSLKLANGRVIEKTLYNRRTRQDEPALFVALTFERREVLDSSNIKPMNLIGVDRGENIPAVIALTDPEGCPLSRFKDSLGNPTHILRIGESYKEKQRTIQAKKEVEQRRAGGYSRKYASKAKNLADDMVRNTARDLLYYAVTQDAMLIFENLSRGFGRQGKRTFMAERQYTRMEDWLTAKLAYEGLPSKTYLSKTLAQYFSKTCSNCGFTITSADYDRVLEKLKKTATGWMTTINGKELKVEGQITYYNRYKRQNVVKDLSVELDRLSEESVNNDISSWTKGRSGEALSLLKKRFSHRPVQEKFVCLNCGFETHADEQAALNIARSWLFLRSQEYKKYQTNKTTGNTDKRAFVETWQSFYRKKLKEVWKPAV

SEQ ID NO: 43878 - protein, 977 aa, Artificial Sequence
  CasX Variant
QEIKRINKIRRRLVKDSNTKKAGKTGPMKTLLVRVMTPDLRERLENLRKKPENIPQPISNTSRANLNKLLTDYTEMKKAILHVYWEEFQKDPVGLMSRVAQPASKKIDQNKLKPEMDEKGNLTTAGFACSQCGQPLFVYKLEQVSEKGKAYTNYFGRCNVAEHEKLILLAQLKPEKDSDEAVTYSLGKFGQRALDFYSIHVTKESTHPVKPLAQIAGNRYASGPVGKALSDACMGTIASFLSKYQDIIIEHQKVVKGNQKRLESLRELAGKENLEYPSVTLPPQPHTKEGVDAYNEVIARVRMWVNLNLWQKLKLSRDDAKPLLRLKGFPSFPLVERQANEVDWWDMVCNVKKLINEKKEDGKVFWQNLAGYKRQEALRPYLSSEEDRKKGKKFARYQLGDLLLHLEKKHGEDWGKVYDEAWERIDKKVEGLSKHIKLEEERRSEDAQSKAALTDWLRAKASFVIEGLKEADKDEFCRCELKLQKWYGDLRGKPFAIEAENSILDISGFSKQYNCAFIWQKDGVKKLNLYLIINYFKGGKLRFKKIKPEAFEANRFYTVINKKSGEIVPMEVNFNFDDPNLIILPLAFGKRQGREFIWNDLLSLETGSLKLANGRVIEKTLYNRRTRQDEPALFVALTFERREVLDSSNIKPMNLIGVDRGENIPAVIALTDPEGCPLSRFKDSLGNPTHILRIGESYKEKQRTIQAKKEVEQRRAGGYSRKYASKAKNLADDMVRNTARDLLYYAVTQDAMLIFENLSRGFGRQGKRTFMAERQYTRMEDWLTAKAYEGLPSKTYLSKTLAQYTSKTCSNCGFTITSADYDRVLEKLKKTATGWMTTINGKELKVEGQITYYNRYKRQNVVKDLSVELDRLSEESVNNDISSWTKGRSGEALSLLKKRFSHRPVQEKFVCLNCGFETHADEQAALNIARSWLFLRSQEYKKYQTNKTTGNTDKRAFVETWQSFYRKKLKEVWKPAV

SEQ ID NO: 43879 - protein, 978 aa, Artificial Sequence
  CasX Variant
QEIKRINKIRRRLVKDSNTKKAGKTGPMKTLLVRVMTPDLRERLENLRKKPENIPQPISNTSRANLNKLLTDYTEMKKAILHVYWEEFQKDPVGLMSRVAQPASKKIDQNKLKPEMDEKGNLTTAGFACSQCGQPLFVYKLEQVSEKGKAYTNYFGRCNVAEHEKLILLAQLKPEKDSDEAVTYSLGKFGQRALDFYSIHVTKESTHPVKPLAQIAGNRYASGPVGKALSDACMGTIASFLSKYQDIIIEHQKVVKGNQKRLESLRELAGKENLEYPSVTLPPQPHTKEGVDAYNEVIARVRMWVNLNLWQKLKLSRDDAKPLLRLKGFPSFPLVERQANEVDWWDMVCNVKKLINEKKEDGKVFWQNLAGYKRQEALRPYLSSEEDRKKGKKFARYQLGDLLLHLEKKHGEDWGKVYDEAWERIDKKVEGLSKHIKLEEERRSEDAQSKAALTDWLRAKASFVIEGLKEADKDEFCRCELKLQKWYGDLRGKPFAIEAENSILDISGFSKQYNCAFIWQKDGVKKLNLYLIINYFKGGKLRFKKIKPEAFEANRFYTVINKKSGEIVPMEVNFNFDDPNLIILPLAFGKRQGREFIWNDLLSLETGSLKLANGRVIEKTLYNRRTRQDEPALFVALTFERREVLDSSNIKPMNLIGVDRGENIPAVIALTDPEGCPLSRFKDSLGNPTHILRIGESYKEKQRTIQAKKEVEQRRAGGYSRKYASKAKNLADDMVRNTARDLLYYAVTQDAMLIFENLSRGFGRQGKRTFMAERQYTRMEDWLTAKLAYEGLPSQTYLSKTLAQYTSKTCSNCGFTITSADYDRVLEKLKKTATGWMTTINGKELKVEGQITYYNRYKRQNVVKDLSVELDRLSEESVNNDISSWTKGRSGEALSLLKKRFSHRPVQEKFVCLNCGFETHADEQAALNIARSWLFLRSQEYKKYQTNKTTGNTDKRAFVETWQSFYRKKLKEVWKPAV

SEQ ID NO: 43880 - protein, 978 aa, Artificial Sequence
  CasX Variant
QEIKRINKIRRRLVKDSNTKKAGKTGPMKTLLVRVMTPDLRERLENLRKKPENIPQPISNTSRANLNKLLTDYTEMKKAILHVYWEEFQKDPVGLMSRVAQPASKKIDQNKLKPEMDEKGNLTTAGFACSQCGQPLFVYKLEQVSEKGKAYTNYFGRCNVAEHEKLILLAQLKPEKDSDEAVTYSLGKFGQRALDFYSIHVTKESTHPVKPLAQIAGNRYASGPVGKALSDACMGTIASFLSKYQDIIIEHQKVVKGNQKRLESLRELAGKENLEYPSVTLPPQPHTKEGVDAYNEVIARVRMWVNLNLWQKLKLSRDDAKPLLRLKGFPSFPLVERQANEVDWWDMVCNVKKLINEKKEDGKVFWQNLAGYKRQEALRPYLSSEEDRKKGKKFARYQLGDLLLHLEKKHGEDWGKVYDEAWERIDKKVEGLSKHIKLEEERRSEDAQSKAALTDWLRAKASFVIEGLKEADKDEFCRCELKLQKWYGDLRGKPFAIEAENSILDISGFSKQYNCAFIWQKDGVKKLNLYLIINYFKGGKLRFKKIKPEAFEANRFYTVINKKSGEIVPMEVNFNFDDPNLIILPLAFGKRQGREFIWNDLLSLETGSLKLANGRVIEKTLYNRRTRQDEPALFVALTFERREVLDSSNIKPMNLIGVDRGENIPAVIALTDPEGCPLSRFKDSLGNPTHILRIGESYKEKQRTIQAKKEVEQRRAGGYSRKYASKAKNLADDMVRNTARDLLYYAVTQDAMLIFENLSRGFGRQGKRTFMAERQYTRMEDWLTAKLAYNGLPSKTYLSKTLAQYTSKTCSNCGFTITSADYDRVLEKLKKTATGWMTTINGKELKVEGQITYYNRYKRQNVVKDLSVELDRLSEESVNNDISSWTKGRSGEALSLLKKRFSHRPVQEKFVCLNCGFETHADEQAALNIARSWLFLRSQEYKKYQTNKTTGNTDKRAFVETWQSFYRKKLKEVWKPAV

SEQ ID NO: 43881 - protein, 979 aa, Artificial Sequence
  CasX Variant
QEIKRINKIRRRLVKDSNTKKAGKTGPMKTLLVRVMTPDLRERLENLRKKPENIPQPISNTSRANLNKLLTDYTEMKKAILHVYWEEFQKDPVGLMSRVAQPASKKIDQNKLKPEMDEKGNLTTAGFACSQCGQPLFVYKLEQVSEKGKAYTNYFGRCNVAEHEKLILLAQLKPEKDSDEAVTYSLGKFGQRALDFYSIHVTKESTHPVKPLAQIAGNRYASGPVGKALSDACMGTIASFLSKYQDIIIEHQKVVKGNQKRLESLRELAGKENLEYPSVTLPPQPHTKEGVDAYNEVIARVRMWVNLNLWQKLKLSRDDAKPLLRLKGFPSFPLVERQANEVDWWDMVCNVKKLINEKKEDGKVFWQNLAGYKRQEALRPYLSSEEDRKKGKKFARYQLGDLLLHLEKKHGEDWGKVYDEAWERIDKKVEGLSKHIKLEEERRSEDAQSKAALTDWLRAKASFVIEGLKEADKDEFCRCELKLQKWYGDLRGKPFAIEAENSILDISGFSKQYNCAFIWQKDGVKKLNLYLIINYFKGGKLRFKKIKPEAFEANRFYTVINKKSGEIVPMEVNFNFDDPNLIILPLAFGKRQGREFIWNDLLSLETGSLKLANGRVIEKTLYNRRTRQDEPALFVALTFERREVLDSSNIKPMNLIGVDRGENIPAVIALTDPEGCPLSRFKDSLGNPTHILRIGESYKEKQRTIQAKKEVEQRRAGGYSRKYASKAKNLADDMVRNTARDLLYYAVTQDAMLIFENLSRGFGRQGKRTFMAERQYTRMEDWLTAKLAYEGLPSKTYLHSKTLAQYTSKTCSNCGFTITSADYDRVLEKLKKTATGWMTTINGKELKVEGQITYYNRYKRQNVVKDLSVELDRLSEESVNNDISSWTKGRSGEALSLLKKRFSHRPVQEKFVCLNCGFETHADEQAALNIARSWLFLRSQEYKKYQTNKTTGNTDKRAFVETWQSFYRKKLKEVWKPAV

SEQ ID NO: 43882 - protein, 978 aa, Artificial Sequence
  CasX Variant
QEIKRINKIRRRLVKDSNTKKAGKTGPMKTLLVRVMTPDLRERLENLRKKPENIPQPISNTSRANLNKLLTDYTEMKKAILHVYWEEFQKDPVGLMSRVAQPASKKIDQNKLKPEMDEKGNLTTAGFACSQCGQPLFVYKLEQVSEKGKAYTNYFGRCNVAEHEKLILLAQLKPEKDSDEAVTYSLGKFGQRALDFYSIHVTKESTHPVKPLAQIAGNRYASGPVGKALSDACMGTIASFLSKYQDIIIEHQKVVKGNQKRLESLRELAGKENLEYPSVTLPPQPHTKEGVDAYNEVIARVRMWVNLNLWQKLKLSRDDAKPLLRLKGFPSFPLVERQANEVDWWDMVCNVKKLINEKKEDGKVFWQNLAGYKRQEALRPYLSSEEDRKKGKKFARYQLGDLLLHLEKKHGEDWGKVYDEAWERIDKKVEGLSKHIKLEEERRSEDAQSKAALTDWLRAKASFVIEGLKEADKDEFCRCELKLQKWYGDLRGKPFAIEAENSILDISGFSKQYNCAFIWQKDGVKKLNLYLIINYFKGGKLRFKKIKPEAFEANRFYTVINKKSGEIVPMEVNFNFDDPNLIILPLAFGKRQGREFIWNDLLSLETGSLKLANGRVIEKTLYNRRTRQDEPALFVALTFERREVLDSSNIKPMNLIGVDRGENIPAVIALTDPEGCPLSRFKDSLGNPTHILRIGESYKEKQRTIQAKKEVEQRRAGGYSRKYASKAKNLADDMVRNTARDLLYYAVTQDAMLIFENLSRGFGRQGKRTFMAERQYTRMEDWLTAKLAYEGLPSKVYLSKTLAQYTSKTCSNCGFTITSADYDRVLEKLKKTATGWMTTINGKELKVEGQITYYNRYKRQNVVKDLSVELDRLSEESVNNDISSWTKGRSGEALSLLKKRFSHRPVQEKFVCLNCGFETHADEQAALNIARSWLFLRSQEYKKYQTNKTTGNTDKRAFVETWQSFYRKKLKEVWKPAV

SEQ ID NO: 43883 - protein, 979 aa, Artificial Sequence
  CasX Variant
QEIKRINKIRRRLVKDSNTKKAGKTGPMKTLLVRVMTPDLRERLENLRKKPENIPQPISNTSRANLNKLLTDYTEMKKAILHVYWEEFQKDPVGLMSRVAQPASKKIDQNKLKPEMDEKGNLTTAGFACSQCGQPLFVYKLEQVSEKGKAYTNYFGRCNVAEHEKLILLAQLKPEKDSDEAVTYSLGKFGQRALDFYSIHVTKESTHPVKPLAQIAGNRYASGPVGKALSDACMGTIASFLSKYQDIIIEHQKVVKGNQKRLESLRELAGKENLEYPSVTLPPQPHTKEGVDAYNEVIARVRMWVNLNLWQKLKLSRDDAKPLLRLKGFPSFPLVERQANEVDWWDMVCNVKKLINEKKEDGKVFWQNLAGYKRQEALRPYLSSEEDRKKGKKFARYQLGDLLLHLEKKHGEDWGKVYDEAWERIDKKVEGLSKHIKLEEERRSEDAQSKAALTDWLRAKASFVIEGLKEADKDEFCRCELKLQKWYGDLRGKPFAIEAENSILDISGFSKQYNCAFIWQKDGVKKLNLYLIINYFKGGKLRFKKIKPEAFEANRFYTVINKKSGEIVPMEVNFNFDDPNLIILPLAFGKRQGREFIWNDLLSLETGSLKLANGRVIEKTLYNRRTRQDEPALFVALTFERREVLDSSNIKPMNLIGVDRGENIPAVIALTDPEGCPLSRFKDSLGNPTHILRIGESYKEKQRTIQAKKEVEQRRAGGYSRKYASKAKNLADDMVRNTARDLLYYAVTQDAMLIFENLSRGFGRQGKRTFMAERQYTRMEDWLTAKLQAYEGLPSKTYLSKTLAQYTSKTCSNCGFTITSADYDRVLEKLKKTATGWMTTINGKELKVEGQITYYNRYKRQNVVKDLSVELDRLSEESVNNDISSWTKGRSGEALSLLKKRFSHRPVQEKFVCLNCGFETHADEQAALNIARSWLFLRSQEYKKYQTNKTTGNTDKRAFVETWQSFYRKKLKEVWKPAV

SEQ ID NO: 43884 - protein, 979 aa, Artificial Sequence
  CasX Variant
QEIKRINKIRRRLVKDSNTKKAGKTGPMKTLLVRVMTPDLRERLENLRKKPENIPQPISNTSRANLNKLLTDYTEMKKAILHVYWEEFQKDPVGLMSRVAQPASKKIDQNKLKPEMDEKGNLTTAGFACSQCGQPLFVYKLEQVSEKGKAYTNYFGRCNVAEHEKLILLAQLKPEKDSDEAVTYSLGKFGQRALDFYSIHVTKESTHPVKPLAQIAGNRYASGPVGKALSDACMGTIASFLSKYQDIIIEHQKVVKGNQKRLESLRELAGKENLEYPSVTLPPQPHTKEGVDAYNEVIARVRMWVNLNLWQKLKLSRDDAKPLLRLKGFPSFPLVERQANEVDWWDMVCNVKKLINEKKEDGKVFWQNLAGYKRQEALRPYLSSEEDRKKGKKFARYQLGDLLLHLEKKHGEDWGKVYDEAWERIDKKVEGLSKHIKLEEERRSEDAQSKAALTDWLRAKASFVIEGLKEADKDEFCRCELKLQKWYGDLRGKPFAIEAENSILDISGFSKQYNCAFIWQKDGVKKLNLYLIINYFKGGKLRFKKIKPEAFEANRFYTVINKKSGEIVPMEVNFNFDDPNLIILPLAFGKRQGREFIWNDLLSLETGSLKLANGRVIEKTLYNRRTRQDEPALFVALTFERREVLDSSNIKPMNLIGVDRGENIPAVIALTDPEGCPLSRFKDSLGNPTHILRIGESYKEKQRTIQAKKEVEQRRAGGYSRKYASKAKNLADDMVRNTARDLLYYAVTQDAMLIFENLSRGFGRQGKRTFMAERQYTRMEDWLTAKLAYEGPLPSKTYLSKTLAQYTSKTCSNCGFTITSADYDRVLEKLKKTATGWMTTINGKELKVEGQITYYNRYKRQNVVKDLSVELDRLSEESVNNDISSWTKGRSGEALSLLKKRFSHRPVQEKFVCLNCGFETHADEQAALNIARSWLFLRSQEYKKYQTNKTTGNTDKRAFVETWQSFYRKKLKEVWKPAV

SEQ ID NO: 43885 - protein, 979 aa, Artificial Sequence
  CasX Variant
QEIKRINKIRRRLVKDSNTKKAGKTGPMKTLLVRVMTPDLRERLENLRKKPENIPQPISNTSRANLNKLLTDYTEMKKAILHVYWEEFQKDPVGLMSRVAQPASKKIDQNKLKPEMDEKGNLTTAGFACSQCGQPLFVYKLEQVSEKGKAYTNYFGRCNVAEHEKLILLAQLKPEKDSDEAVTYSLGKFGQRALDFYSIHVTKESTHPVKPLAQIAGNRYASGPVGKALSDACMGTIASFLSKYQDIIIEHQKVVKGNQKRLESLRELAGKENLEYPSVTLPPQPHTKEGVDAYNEVIARVRMWVNLNLWQKLKLSRDDAKPLLRLKGFPSFPLVERQANEVDWWDMVCNVKKLINEKKEDGKVFWQNLAGYKRQEALRPYLSSEEDRKKGKKFARYQLGDLLLHLEKKHGEDWGKVYDEAWERIDKKVEGLSKHIKLEEERRSEDAQSKAALTDWLRAKASFVIEGLKEADKDEFCRCELKLQKWYGDLRGKPFAIEAENSILDISGFSKQYNCAFIWQKDGVKKLNLYLIINYFKGGKLRFKKIKPEAFEANRFYTVINKKSGEIVPMEVNFNFDDPNLIILPLAFGKRQGREFIWNDLLSLETGSLKLANGRVIEKTLYNRRTRQDEPALFVALTFERREVLDSSNIKPMNLIGVDRGENIPAVIALTDPEGCPLSRFKDSLGNPTHILRIGESYKEKQRTIQAKKEVEQRRAGGYSRKYASKAKNLADDMVRNTARDLLYYAVTQDAMLIFENLSRGFGRQGKRTFMAERQYTRMEDWLTAKLAYEGLPSKTYLSKRTLAQYTSKTCSNCGFTITSADYDRVLEKLKKTATGWMTTINGKELKVEGQITYYNRYKRQNVVKDLSVELDRLSEESVNNDISSWTKGRSGEALSLLKKRFSHRPVQEKFVCLNCGFETHADEQAALNIARSWLFLRSQEYKKYQTNKTTGNTDKRAFVETWQSFYRKKLKEVWKPAV

SEQ ID NO: 43886 - protein, 979 aa, Artificial Sequence
  CasX Variant
QEIKRINKIRRRLVKDSNTKKAGKTGPMKTLLVRVMTPDLRERLENLRKKPENIPQPISNTSRANLNKLLTDYTEMKKAILHVYWEEFQKDPVGLMSRVAQPASKKIDQNKLKPEMDEKGNLTTAGFACSQCGQPLFVYKLEQVSEKGKAYTNYFGRCNVAEHEKLILLAQLKPEKDSDEAVTYSLGKFGQRALDFYSIHVTKESTHPVKPLAQIAGNRYASGPVGKALSDACMGTIASFLSKYQDIIIEHQKVVKGNQKRLESLRELAGKENLEYPSVTLPPQPHTKEGVDAYNEVIARVRMWVNLNLWQKLKLSRDDAKPLLRLKGFPSFPLVERQANEVDWWDMVCNVKKLINEKKEDGKVFWQNLAGYKRQEALRPYLSSEEDRKKGKKFARYQLGDLLLHLEKKHGEDWGKVYDEAWERIDKKVEGLSKHIKLEEERRSEDAQSKAALTDWLRAKASFVIEGLKEADKDEFCRCELKLQKWYGDLRGKPFAIEAENSILDISGFSKQYNCAFIWQKDGVKKLNLYLIINYFKGGKLRFKKIKPEAFEANRFYTVINKKSGEIVPMEVNFNFDDPNLIILPLAFGKRQGREFIWNDLLSLETGSLKLANGRVIEKTLYNRRTRQDEPALFVALTFERREVLDSSNIKPMNLIGVDRGENIPAVIALTDPEGCPLSRFKDSLGNPTHILRIGESYKEKQRTIQAKKEVEQRRAGGYSRKYASKAKNLADDMVRNTARDLLYYAVTQDAMLIFENLSRGFGRQGKRTFMAERQYTRMEDWLTAKLAYEGLPSKTYLSKTLAQYTSKTCSNCWGFTITSADYDRVLEKLKKTATGWMTTINGKELKVEGQITYYNRYKRQNVVKDLSVELDRLSEESVNNDISSWTKGRSGEALSLLKKRFSHRPVQEKFVCLNCGFETHADEQAALNIARSWLFLRSQEYKKYQTNKTTGNTDKRAFVETWQSFYRKKLKEVWKPAV

SEQ ID NO: 43887 - protein, 979 aa, Artificial Sequence
  CasX Variant
QEIKRINKIRRRLVKDSNTKKAGKTGPMKTLLVRVMTPDLRERLENLRKKPENIPQPISNTSRANLNKLLTDYTEMKKAILHVYWEEFQKDPVGLMSRVAQPASKKIDQNKLKPEMDEKGNLTTAGFACSQCGQPLFVYKLEQVSEKGKAYTNYFGRCNVAEHEKLILLAQLKPEKDSDEAVTYSLGKFGQRALDFYSIHVTKESTHPVKPLAQIAGNRYASGPVGKALSDACMGTIASFLSKYQDIIIEHQKVVKGNQKRLESLRELAGKENLEYPSVTLPPQPHTKEGVDAYNEVIARVRMWVNLNLWQKLKLSRDDAKPLLRLKGFPSFPLVERQANEVDWWDMVCNVKKLINEKKEDGKVFWQNLAGYKRQEALRPYLSSEEDRKKGKKFARYQLGDLLLHLEKKHGEDWGKVYDEAWERIDKKVEGLSKHIKLEEERRSEDAQSKAALTDWLRAKASFVIEGLKEADKDEFCRCELKLQKWYGDLRGKPFAIEAENSILDISGFSKQYNCAFIWQKDGVKKLNLYLIINYFKGGKLRFKKIKPEAFEANRFYTVINKKSGEIVPMEVNFNFDDPNLIILPLAFGKRQGREFIWNDLLSLETGSLKLANGRVIEKTLYNRRTRQDEPALFVALTFERREVLDSSNIKPMNLIGVDRGENIPAVIALTDPEGCPLSRFKDSLGNPTHILRIGESYKEKQRTIQAKKEVEQRRAGGYSRKYASKAKNLADDMVRNTARDLLYYAVTQDAMLIFENLSRGFGRQGKRTFMAERQYTRMEDWLTAKLANYEGLPSKTYLSKTLAQYTSKTCSNCGFTITSADYDRVLEKLKKTATGWMTTINGKELKVEGQITYYNRYKRQNVVKDLSVELDRLSEESVNNDISSWTKGRSGEALSLLKKRFSHRPVQEKFVCLNCGFETHADEQAALNIARSWLFLRSQEYKKYQTNKTTGNTDKRAFVETWQSFYRKKLKEVWKPAV

SEQ ID NO: 43888 - protein, 978 aa, Artificial Sequence
  CasX Variant
QEIKRINKIRRRLVKDSNTKKAGKTGPMKTLLVRVMTPDLRERLENLRKKPENIPQPISNTSRANLNKLLTDYTEMKKAILHVYWEEFQKDPVGLMSRVAQPASKKIDQNKLKPEMDEKGNLTTAGFACSQCGQPLFVYKLEQVSEKGKAYTNYFGRCNVAEHEKLILLAQLKPEKDSDEAVTYSLGKFGQRALDFYSIHVTKESTHPVKPLAQIAGNRYASGPVGKALSDACMGTIASFLSKYQDIIIEHQKVVKGNQKRLESLRELAGKENLEYPSVTLPPQPHTKEGVDAYNEVIARVRMWVNLNLWQKLKLSRDDAKPLLRLKGFPSFPLVERQANEVDWWDMVCNVKKLINEKKEDGKVFWQNLAGYKRQEALRPYLSSEEDRKKGKKFARYQLGDLLLHLEKKHGEDWGKVYDEAWERIDKKVEGLSKHIKLEEERRSEDAQSKAALTDWLRAKASFVIEGLKEADKDEFCRCELKLQKWYGDLRGKPFAIEAENSILDISGFSKQYNCAFIWQKDGVKKLNLYLIINYFKGGKLRFKKIKPEAFEANRFYTVINKKSGEIVPMEVNFNFDDPNLIILPLAFGKRQGREFIWNDLLSLETGSLKLANGRVIEKTLYNRRTRQDEPALFVALTFERREVLDSSNIKPMNLIGVDRGENIPAVIALTDPEGCPLSRFKDSLGNPTHILRIGESYKEKQRTIQAKKEVEQRRAGGYSRKYASKAKNLADDMVRNTARDLLYYAVTQDAMLIFENLSRGFGRQGKRTFMAERQYTRMEDWLTAKLAYEGLPSKTYLSKTLAQYTSKTCSNSGFTITSADYDRVLEKLKKTATGWMTTINGKELKVEGQITYYNRYKRQNVVKDLSVELDRLSEESVNNDISSWTKGRSGEALSLLKKRFSHRPVQEKFVCLNCGFETHADEQAALNIARSWLFLRSQEYKKYQTNKTTGNTDKRAFVETWQSFYRKKLKEVWKPAV

SEQ ID NO: 43889 - protein, 978 aa, Artificial Sequence
  CasX Variant
QEIKRINKIRRRLVKDSNTKKAGKTGPMKTLLVRVMTPDLRERLENLRKKPENIPQPISNTSRANLNKLLTDYTEMKKAILHVYWEEFQKDPVGLMSRVAQPASKKIDQNKLKPEMDEKGNLTTAGFACSQCGQPLFVYKLEQVSEKGKAYTNYFGRCNVAEHEKLILLAQLKPEKDSDEAVTYSLGKFGQRALDFYSIHVTKESTHPVKPLAQIAGNRYASGPVGKALSDACMGTIASFLSKYQDIIIEHQKVVKGNQKRLESLRELAGKENLEYPSVTLPPQPHTKEGVDAYNEVIARVRMWVNLNLWQKLKLSRDDAKPLLRLKGFPSFPLVERQANEVDWWDMVCNVKKLINEKKEDGKVFWQNLAGYKRQEALRPYLSSEEDRKKGKKFARYQLGDLLLHLEKKHGEDWGKVYDEAWERIDKKVEGLSKHIKLEEERRSEDAQSKAALTDWLRAKASFVIEGLKEADKDEFCRCELKLQKWYGDLRGKPFAIEAENSILDISGFSKQYNCAFIWQKDGVKKLNLYLIINYFKGGKLRFKKIKPEAFEANRFYTVINKKSGEIVPMEVNFNFDDPNLIILPLAFGKRQGREFIWNDLLSLETGSLKLANGRVIEKTLYNRRTRQDEPALFVALTFERREVLDSSNIKPMNLIGVDRGENIPAVIALTDPEGCPLSRFKDSLGNPTHILRIGESYKEKQRTIQAKKEVEQRRAGGYSRKYASKAKNLADDMVRNTARDLLYYAVTQDAMLIFENLSRGFGRQGKRTFMAERQYTRMEDWLTAKLAYEGLPSKTYLSKTLSQYTSKTCSNCGFTITSADYDRVLEKLKKTATGWMTTINGKELKVEGQITYYNRYKRQNVVKDLSVELDRLSEESVNNDISSWTKGRSGEALSLLKKRFSHRPVQEKFVCLNCGFETHADEQAALNIARSWLFLRSQEYKKYQTNKTTGNTDKRAFVETWQSFYRKKLKEVWKPAV

SEQ ID NO: 43890 - protein, 979 aa, Artificial Sequence
  CasX Variant
QEIKRINKIRRRLVKDSNTKKAGKTGPMKTLLVRVMTPDLRERLENLRKKPENIPQPISNTSRANLNKLLTDYTEMKKAILHVYWEEFQKDPVGLMSRVAQPASKKIDQNKLKPEMDEKGNLTTAGFACSQCGQPLFVYKLEQVSEKGKAYTNYFGRCNVAEHEKLILLAQLKPEKDSDEAVTYSLGKFGQRALDFYSIHVTKESTHPVKPLAQIAGNRYASGPVGKALSDACMGTIASFLSKYQDIIIEHQKVVKGNQKRLESLRELAGKENLEYPSVTLPPQPHTKEGVDAYNEVIARVRMWVNLNLWQKLKLSRDDAKPLLRLKGFPSFPLVERQANEVDWWDMVCNVKKLINEKKEDGKVFWQNLAGYKRQEALRPYLSSEEDRKKGKKFARYQLGDLLLHLEKKHGEDWGKVYDEAWERIDKKVEGLSKHIKLEEERRSEDAQSKAALTDWLRAKASFVIEGLKEADKDEFCRCELKLQKWYGDLRGKPFAIEAENSILDISGFSKQYNCAFIWQKDGVKKLNLYLIINYFKGGKLRFKKIKPEAFEANRFYTVINKKSGEIVPMEVNFNFDDPNLIILPLAFGKRQGREFIWNDLLSLETGSLKLANGRVIEKTLYNRRTRQDEPALFVALTFERREVLDSSNIKPMNLIGVDRGENIPAVIALTDPEGCPLSRFKDSLGNPTHILRIGESYKEKQRTIQAKKEVEQRRAGGYSRKYASKAKNLADDMVRNTARDLLYYAVTQDAMLIFENLSRGFGRQGKRTFMAERQYTRMEDWLTAKLAYEGLPSKTYRLSKTLAQYTSKTCSNCGFTITSADYDRVLEKLKKTATGWMTTINGKELKVEGQITYYNRYKRQNVVKDLSVELDRLSEESVNNDISSWTKGRSGEALSLLKKRFSHRPVQEKFVCLNCGFETHADEQAALNIARSWLFLRSQEYKKYQTNKTTGNTDKRAFVETWQSFYRKKLKEVWKPAV

SEQ ID NO: 43891 - protein, 978 aa, Artificial Sequence
  CasX Variant
QEIKRINKIRRRLVKDSNTKKAGKTGPMKTLLVRVMTPDLRERLENLRKKPENIPQPISNTSRANLNKLLTDYTEMKKAILHVYWEEFQKDPVGLMSRVAQPASKKIDQNKLKPEMDEKGNLTTAGFACSQCGQPLFVYKLEQVSEKGKAYTNYFGRCNVAEHEKLILLAQLKPEKDSDEAVTYSLGKFGQRALDFYSIHVTKESTHPVKPLAQIAGNRYASGPVGKALSDACMGTIASFLSKYQDIIIEHQKVVKGNQKRLESLRELAGKENLEYPSVTLPPQPHTKEGVDAYNEVIARVRMWVNLNLWQKLKLSRDDAKPLLRLKGFPSFPLVERQANEVDWWDMVCNVKKLINEKKEDGKVFWQNLAGYKRQEALRPYLSSEEDRKKGKKFARYQLGDLLLHLEKKHGEDWGKVYDEAWERIDKKVEGLSKHIKLEEERRSEDAQSKAALTDWLRAKASFVIEGLKEADKDEFCRCELKLQKWYGDLRGKPFAIEAENSILDISGFSKQYNCAFIWQKDGVKKLNLYLIINYFKGGKLRFKKIKPEAFEANRFYTVINKKSGEIVPMEVNFNFDDPNLIILPLAFGKRQGREFIWNDLLSLETGSLKLANGRVIEKTLYNRRTRQDEPALFVALTFERREVLDSSNIKPMNLIGVDRGENIPAVIALTDPEGCPLSRFKDSLGNPTHILRIGESYKEKQRTIQAKKEVEQRRAGGYSRKYASKAKNLADDMVRNTARDLLYYAVTQDAMLIFENLSRGFGRQGKRTFMAERQYTRMEDWLTAKRAYEGLPSKTYLSKTLAQYTSKTCSNCGFTITSADYDRVLEKLKKTATGWMTTINGKELKVEGQITYYNRYKRQNVVKDLSVELDRLSEESVNNDISSWTKGRSGEALSLLKKRFSHRPVQEKFVCLNCGFETHADEQAALNIARSWLFLRSQEYKKYQTNKTTGNTDKRAFVETWQSFYRKKLKEVWKPAV

SEQ ID NO: 43892 - protein, 978 aa, Artificial Sequence
  CasX Variant
QEIKRINKIRRRLVKDSNTKKAGKTGPMKTLLVRVMTPDLRERLENLRKKPENIPQPISNTSRANLNKLLTDYTEMKKAILHVYWEEFQKDPVGLMSRVAQPASKKIDQNKLKPEMDEKGNLTTAGFACSQCGQPLFVYKLEQVSEKGKAYTNYFGRCNVAEHEKLILLAQLKPEKDSDEAVTYSLGKFGQRALDFYSIHVTKESTHPVKPLAQIAGNRYASGPVGKALSDACMGTIASFLSKYQDIIIEHQKVVKGNQKRLESLRELAGKENLEYPSVTLPPQPHTKEGVDAYNEVIARVRMWVNLNLWQKLKLSRDDAKPLLRLKGFPSFPLVERQANEVDWWDMVCNVKKLINEKKEDGKVFWQNLAGYKRQEALRPYLSSEEDRKKGKKFARYQLGDLLLHLEKKHGEDWGKVYDEAWERIDKKVEGLSKHIKLEEERRSEDAQSKAALTDWLRAKASFVIEGLKEADKDEFCRCELKLQKWYGDLRGKPFAIEAENSILDISGFSKQYNCAFIWQKDGVKKLNLYLIINYFKGGKLRFKKIKPEAFEANRFYTVINKKSGEIVPMEVNFNFDDPNLIILPLAFGKRQGREFIWNDLLSLETGSLKLANGRVIEKTLYNRRTRQDEPALFVALTFERREVLDSSNIKPMNLIGVDRGENIPAVIALTDPEGCPLSRFKDSLGNPTHILRIGESYKEKQRTIQAKKEVEQRRAGGYSRKYASKAKNLADDMVRNTARDLLYYAVTQDAMLIFENLSRGFGRQGKRTFMAERQYTRMEDWLTAKDAYEGLPSKTYLSKTLAQYTSKTCSNCGFTITSADYDRVLEKLKKTATGWMTTINGKELKVEGQITYYNRYKRQNVVKDLSVELDRLSEESVNNDISSWTKGRSGEALSLLKKRFSHRPVQEKFVCLNCGFETHADEQAALNIARSWLFLRSQEYKKYQTNKTTGNTDKRAFVETWQSFYRKKLKEVWKPAV

SEQ ID NO: 43893 - protein, 978 aa, Artificial Sequence
  CasX Variant
QEIKRINKIRRRLVKDSNTKKAGKTGPMKTLLVRVMTPDLRERLENLRKKPENIPQPISNTSRANLNKLLTDYTEMKKAILHVYWEEFQKDPVGLMSRVAQPASKKIDQNKLKPEMDEKGNLTTAGFACSQCGQPLFVYKLEQVSEKGKAYTNYFGRCNVAEHEKLIQLAQLKPEKDSDEAVTYSLGKFGQRALDFYSIHVTKESTHPVKPLAQIAGNRYASGPVGKALSDACMGTIASFLSKYQDIIIEHQKVVKGNQKRLESLRELAGKENLEYPSVTLPPQPHTKEGVDAYNEVIARVRMWVNLNLWQKLKLSRDDAKPLLRLKGFPSFPLVERQANEVDWWDMVCNVKKLINEKKEDGKVFWQNLAGYKRQEALRPYLSSEEDRKKGKKFARYQLGDLLLHLEKKHGEDWGKVYDEAWERIDKKVEGLSKHIKLEEERRSEDAQSKAALTDWLRAKASFVIEGLKEADKDEFCRCELKLQKWYGDLRGKPFAIEAENSILDISGFSKQYNCAFIWQKDGVKKLNLYLIINYFKGGKLRFKKIKPEAFEANRFYTVINKKSGEIVPMEVNFNFDDPNLIILPLAFGKRQGREFIWNDLLSLETGSLKLANGRVIEKTLYNRRTRQDEPALFVALTFERREVLDSSNIKPMNLIGVDRGENIPAVIALTDPEGCPLSRFKDSLGNPTHILRIGESYKEKQRTIQAKKEVEQRRAGGYSRKYASKAKNLADDMVRNTARDLLYYAVTQDAMLIFENLSRGFGRQGKRTFMAERQYTRMEDWLTAKLAYEGLPSKTYLSKTLAQYTSKTCSNCGFTITSADYDRVLEKLKKTATGWMTTINGKELKVEGQITYYNRYKRQNVVKDLSVELDRLSEESVNNDISSWTKGRSGEALSLLKKRFSHRPVQEKFVCLNCGFETHADEQAALNIARSWLFLRSQEYKKYQTNKTTGNTDKRAFVETWQSFYRKKLKEVWKPAV

SEQ ID NO: 43894 - protein, 978 aa, Artificial Sequence
  CasX Variant
QEIKRINKIRRRLVKDSNTKKAGKTGPMKTLLVRVMTPDLRERLENLRKKPENIPQPISNTSRANLNKLLTDYTEMKKAILHVYWEEFQKDPVGLMSRVAQPASKKIDQNKLKPEMDEKGNLTTAGFACSQCGQPLFVYKLEQVSEKGKAYTNYFGRCNVAEHEKLILLAQLKPEKDSDEAVTYSLGKFGQRALDFYSIHVTKESTHPVKPLAQIAGNRYMSGPVGKALSDACMGTIASFLSKYQDIIIEHQKVVKGNQKRLESLRELAGKENLEYPSVTLPPQPHTKEGVDAYNEVIARVRMWVNLNLWQKLKLSRDDAKPLLRLKGFPSFPLVERQANEVDWWDMVCNVKKLINEKKEDGKVFWQNLAGYKRQEALRPYLSSEEDRKKGKKFARYQLGDLLLHLEKKHGEDWGKVYDEAWERIDKKVEGLSKHIKLEEERRSEDAQSKAALTDWLRAKASFVIEGLKEADKDEFCRCELKLQKWYGDLRGKPFAIEAENSILDISGFSKQYNCAFIWQKDGVKKLNLYLIINYFKGGKLRFKKIKPEAFEANRFYTVINKKSGEIVPMEVNFNFDDPNLIILPLAFGKRQGREFIWNDLLSLETGSLKLANGRVIEKTLYNRRTRQDEPALFVALTFERREVLDSSNIKPMNLIGVDRGENIPAVIALTDPEGCPLSRFKDSLGNPTHILRIGESYKEKQRTIQAKKEVEQRRAGGYSRKYASKAKNLADDMVRNTARDLLYYAVTQDAMLIFENLSRGFGRQGKRTFMAERQYTRMEDWLTAKLAYEGLPSKTYLSKTLAQYTSKTCSNCGFTITSADYDRVLEKLKKTATGWMTTINGKELKVEGQITYYNRYKRQNVVKDLSVELDRLSEESVNNDISSWTKGRSGEALSLLKKRFSHRPVQEKFVCLNCGFETHADEQAALNIARSWLFLRSQEYKKYQTNKTTGNTDKRAFVETWQSFYRKKLKEVWKPAV

SEQ ID NO: 43895 - protein, 978 aa, Artificial Sequence
  CasX Variant
QEIKRINKIRRRLVKDSNTKKAGKTGPMKTLLVRVMTPDLRERLENLRKKPENIPQPISNTSRANLNKLLTDYTEMKKAILHVYWEEFQKDPVGLMSRVAQPASKKIDQNKLKPEMDEKGNLTTAGFACSQCGQPLFVYKLEQVSEKGKAYTNYFGRCNVAEHEKLILLAQLKPEKDSDEAVTYSLGKFGQRALDFYSIHVTKESTHPVKPLAQIAGNRYASGPVGKALSDACMGTIASFLSKYQDIIIEHQKVVKGNQKRLESLRELAGKENLEYPSVTLPPQPHTKEGVDAYNEVIARVRMWVNLNLWQKLKLSRDDAKPLLRLKGFPSFPLVERQANEVDWWDMVCNVKKLINEKKEDGKVFWQNLAIYKRQEALRPYLSSEEDRKKGKKFARYQLGDLLLHLEKKHGEDWGKVYDEAWERIDKKVEGLSKHIKLEEERRSEDAQSKAALTDWLRAKASFVIEGLKEADKDEFCRCELKLQKWYGDLRGKPFAIEAENSILDISGFSKQYNCAFIWQKDGVKKLNLYLIINYFKGGKLRFKKIKPEAFEANRFYTVINKKSGEIVPMEVNFNFDDPNLIILPLAFGKRQGREFIWNDLLSLETGSLKLANGRVIEKTLYNRRTRQDEPALFVALTFERREVLDSSNIKPMNLIGVDRGENIPAVIALTDPEGCPLSRFKDSLGNPTHILRIGESYKEKQRTIQAKKEVEQRRAGGYSRKYASKAKNLADDMVRNTARDLLYYAVTQDAMLIFENLSRGFGRQGKRTFMAERQYTRMEDWLTAKLAYEGLPSKTYLSKTLAQYTSKTCSNCGFTITSADYDRVLEKLKKTATGWMTTINGKELKVEGQITYYNRYKRQNVVKDLSVELDRLSEESVNNDISSWTKGRSGEALSLLKKRFSHRPVQEKFVCLNCGFETHADEQAALNIARSWLFLRSQEYKKYQTNKTTGNTDKRAFVETWQSFYRKKLKEVWKPAV

SEQ ID NO: 43896 - protein, 979 aa, Artificial Sequence
  CasX Variant
QEIKRINKIRRRLVKDSNTKKAGKTGPMKTLLVRVMTPDLRERLENLRKKPENIPQPISNTSRANLNKLLTDYTEMKKAILHVYWEEFQKDPVGLMSRVAQPASKKIDQNKLKPEMDEKGNLTTAGFACSQCGQPLFVYKLEQVSEKGKAYTNYFGRCNVAEHEKLILLAQLKPEKDSDEAVTYSLGKFGQRALDFYSIHVTKESTHPVKPLAQIAGNRYASGPVGKALSDACMGTIASFLSKYQDIIIEHQKVVKGNQKRLESLRELAGKENLEYPSVTLPPQPHTKEGVDAYNEVIARVRMWVNLNLWQKLKLSRDDAKPLLRLKGFPSFPLVERQANEVDWWDMVCNVKKLINEKKEDGKVFWQNLAGYKRQEALRPYLSSEEDVRKKGKKFARYQLGDLLLHLEKKHGEDWGKVYDEAWERIDKKVEGLSKHIKLEEERRSEDAQSKAALTDWLRAKASFVIEGLKEADKDEFCRCELKLQKWYGDLRGKPFAIEAENSILDISGFSKQYNCAFIWQKDGVKKLNLYLIINYFKGGKLRFKKIKPEAFEANRFYTVINKKSGEIVPMEVNFNFDDPNLIILPLAFGKRQGREFIWNDLLSLETGSLKLANGRVIEKTLYNRRTRQDEPALFVALTFERREVLDSSNIKPMNLIGVDRGENIPAVIALTDPEGCPLSRFKDSLGNPTHILRIGESYKEKQRTIQAKKEVEQRRAGGYSRKYASKAKNLADDMVRNTARDLLYYAVTQDAMLIFENLSRGFGRQGKRTFMAERQYTRMEDWLTAKLAYEGLPSKTYLSKTLAQYTSKTCSNCGFTITSADYDRVLEKLKKTATGWMTTINGKELKVEGQITYYNRYKRQNVVKDLSVELDRLSEESVNNDISSWTKGRSGEALSLLKKRFSHRPVQEKFVCLNCGFETHADEQAALNIARSWLFLRSQEYKKYQTNKTTGNTDKRAFVETWQSFYRKKLKEVWKPAV

SEQ ID NO: 43897 - protein, 978 aa, Artificial Sequence
  CasX Variant
QEIKRINKIRRRLVKDSNTKKAGKTGPMKTLLVRVMTPDLRERLENLRKKPENIPQPISNTSRANLNKLLTDYTEMKKAILHVYWEEFQKDPVGLMSRVAQPASKKIDQNKLKPEMDEKGNLTTAGFACSQCGQPLFVYKLEQVSEKGKAYTNYFGRCNVAEHEKLILLAQLKPEKDSDEAVTYSLGKFGQRALDFYSIHVTKESTHPVKPLAQIAGNRYASGPVGKALSDACMGTIASFLSKYQDIIIEHQKVVKGNQKRLESLRELAGKENLEYPSVTLPPQPHTKEGVDAYNEVIARVRMWVNLNLWQKLKLSRDDAKPLLRLKGFPSFPLVERQANEVDWWDMVCNVKKLINEKKEDGKVFWQNLAGYKRQEALRPYLSSEEDREKGKKFARYQLGDLLLHLEKKHGEDWGKVYDEAWERIDKKVEGLSKHIKLEEERRSEDAQSKAALTDWLRAKASFVIEGLKEADKDEFCRCELKLQKWYGDLRGKPFAIEAENSILDISGFSKQYNCAFIWQKDGVKKLNLYLIINYFKGGKLRFKKIKPEAFEANRFYTVINKKSGEIVPMEVNFNFDDPNLIILPLAFGKRQGREFIWNDLLSLETGSLKLANGRVIEKTLYNRRTRQDEPALFVALTFERREVLDSSNIKPMNLIGVDRGENIPAVIALTDPEGCPLSRFKDSLGNPTHILRIGESYKEKQRTIQAKKEVEQRRAGGYSRKYASKAKNLADDMVRNTARDLLYYAVTQDAMLIFENLSRGFGRQGKRTFMAERQYTRMEDWLTAKLAYEGLPSKTYLSKTLAQYTSKTCSNCGFTITSADYDRVLEKLKKTATGWMTTINGKELKVEGQITYYNRYKRQNVVKDLSVELDRLSEESVNNDISSWTKGRSGEALSLLKKRFSHRPVQEKFVCLNCGFETHADEQAALNIARSWLFLRSQEYKKYQTNKTTGNTDKRAFVETWQSFYRKKLKEVWKPAV

SEQ ID NO: 43898 - protein, 979 aa, Artificial Sequence
  CasX Variant
QEIKRINKIRRRLVKDSNTKKAGKTGPMKTLLVRVMTPDLRERLENLRKKPENIPQPISNTSRANLNKLLTDYTEMKKAILHVYWEEFQKDPVGLMSRVAQPASKKIDQNKLKPEMDEKGNLTTAGFACSQCGQPLFVYKLEQVSEKGKAYTNYFGRCNVAEHEKLILLAQLKPEKDSDEAVTYSLGKFGQRALDFYSIHVTKESTHPVKPLAQIAGNRYASGPVGKALSDACMGTIASFLSKYQDIIIEHQKVVKGNQKRLESLRELAGKENLEYPSVTLPPQPHTKEGVDAYNEVIARVRMWVNLNLWQKLKLSRDDAKPLLRLKGFPSFPLVERQANEVDWWDMVCNVKKLINEKKEDGKVFWQNLAGYKRQEALRPYLSSEEDRKKGKKFARYQLGDLLLHLEKKHGEDWGKVYDEAWERIDKKVEGLSKHIKLEEERRSEDAQSKAALTDWLRAKASFVIEGLKEADKDEMFCRCELKLQKWYGDLRGKPFAIEAENSILDISGFSKQYNCAFIWQKDGVKKLNLYLIINYFKGGKLRFKKIKPEAFEANRFYTVINKKSGEIVPMEVNFNFDDPNLIILPLAFGKRQGREFIWNDLLSLETGSLKLANGRVIEKTLYNRRTRQDEPALFVALTFERREVLDSSNIKPMNLIGVDRGENIPAVIALTDPEGCPLSRFKDSLGNPTHILRIGESYKEKQRTIQAKKEVEQRRAGGYSRKYASKAKNLADDMVRNTARDLLYYAVTQDAMLIFENLSRGFGRQGKRTFMAERQYTRMEDWLTAKLAYEGLPSKTYLSKTLAQYTSKTCSNCGFTITSADYDRVLEKLKKTATGWMTTINGKELKVEGQITYYNRYKRQNVVKDLSVELDRLSEESVNNDISSWTKGRSGEALSLLKKRFSHRPVQEKFVCLNCGFETHADEQAALNIARSWLFLRSQEYKKYQTNKTTGNTDKRAFVETWQSFYRKKLKEVWKPAV

SEQ ID NO: 43899 - protein, 978 aa, Artificial Sequence
  CasX Variant
QEIKRINKIRRRLVKDSNTKKAGKTGPMKTLLVRVMTPDLRERLENLRKKPENIPQPISNTSRANLNKLLTDYTEMKKAILHVYWEEFQKDPVGLMSRVAQPASKKIDQNKLKPEMDEKGNLTTAGFACSQCGQPLFVYKLEQVSEKGKAYTNYFGRCNVAEHEKLILLAQLKPEKDSDEAVTYSLGKFGQRALDFYSIHVTKESTHPVKPLAQIAGNRYASGPVGKALSDACMGTIASFLSKYQDIIIEHQKVVKGNQKRLESLRELAGKENLEYPSVTLPPQPHTKEGVDAYNEVIARVRMWVNLNLWQKLKLSRDDAKPLLRLKGFPSFPLVERQANEVDWWDMVCNVKKLINEKKEDGKVFWQNLAGYKRQEALRPYLSSEEDRKKGKKFARYQLGDLLLHLEKKHGEDWGKVYDEAWERIDKKVEGLSKHIKLEEERRSEDAQSKAALTDWLRAKASFVIEGLKEADKDEFCRCELKLQKWYGDLRGKPFAIEAENSILDISGFSKQYNCAFIWQKDGVKKQNLYLIINYFKGGKLRFKKIKPEAFEANRFYTVINKKSGEIVPMEVNFNFDDPNLIILPLAFGKRQGREFIWNDLLSLETGSLKLANGRVIEKTLYNRRTRQDEPALFVALTFERREVLDSSNIKPMNLIGVDRGENIPAVIALTDPEGCPLSRFKDSLGNPTHILRIGESYKEKQRTIQAKKEVEQRRAGGYSRKYASKAKNLADDMVRNTARDLLYYAVTQDAMLIFENLSRGFGRQGKRTFMAERQYTRMEDWLTAKLAYEGLPSKTYLSKTLAQYTSKTCSNCGFTITSADYDRVLEKLKKTATGWMTTINGKELKVEGQITYYNRYKRQNVVKDLSVELDRLSEESVNNDISSWTKGRSGEALSLLKKRFSHRPVQEKFVCLNCGFETHADEQAALNIARSWLFLRSQEYKKYQTNKTTGNTDKRAFVETWQSFYRKKLKEVWKPAV

SEQ ID NO: 43900 - protein, 978 aa, Artificial Sequence
  CasX Variant
QEIKRINKIRRRLVKDSNTKKAGKTGPMKTLLVRVMTPDLRERLENLRKKPENIPQPISNTSRANLNKLLTDYTEMKKAILHVYWEEFQKDPVGLMSRVAQPASKKIDQNKLKPEMDEKGNLTTAGFACSQCGQPLFVYKLEQVSEKGKAYTNYFGRCNVAEHEKLILLAQLKPEKDSDEAVTYSLGKFGQRALDFYSIHVTKESTHPVKPLAQIAGNRYASGPVGKALSDACMGTIASFLSKYQDIIIEHQKVVKGNQKRLESLRELAGKENLEYPSVTLPPQPHTKEGVDAYNEVIARVRMWVNLNLWQKLKLSRDDAKPLLRLKGFPSFPLVERQANEVDWWDMVCNVKKLINEKKEDGKVFWQNLAGYKRQEALRPYLSSEEDRKKGKKFARYQLGDLLLHLEKKHGEDWGKVYDEAWERIDKKVEGLSKHIKLEEERRSEDAQSKAALTDWLRAKASFVIEGLKEADKDEFCRCELKLQKWYGDLRGKPFAIEAENSILDISGFSKQYNCAFIWQKDGVKKLNLYLIINYFKGGKLRFKKIKPEAFEANRFYTVINKKSGEIVIMEVNFNFDDPNLIILPLAFGKRQGREFIWNDLLSLETGSLKLANGRVIEKTLYNRRTRQDEPALFVALTFERREVLDSSNIKPMNLIGVDRGENIPAVIALTDPEGCPLSRFKDSLGNPTHILRIGESYKEKQRTIQAKKEVEQRRAGGYSRKYASKAKNLADDMVRNTARDLLYYAVTQDAMLIFENLSRGFGRQGKRTFMAERQYTRMEDWLTAKLAYEGLPSKTYLSKTLAQYTSKTCSNCGFTITSADYDRVLEKLKKTATGWMTTINGKELKVEGQITYYNRYKRQNVVKDLSVELDRLSEESVNNDISSWTKGRSGEALSLLKKRFSHRPVQEKFVCLNCGFETHADEQAALNIARSWLFLRSQEYKKYQTNKTTGNTDKRAFVETWQSFYRKKLKEVWKPAV

SEQ ID NO: 43901 - protein, 978 aa, Artificial Sequence
  CasX Variant
QEIKRINKIRRRLVKDSNTKKAGKTGPMKTLLVRVMTPDLRERLENLRKKPENIPQPISNTSRANLNKLLTDYTEMKKAILHVYWEEFQKDPVGLMSRVAQPASKKIDQNKLKPEMDEKGNLTTAGFACSQCGQPLFVYKLEQVSEKGKAYTNYFGRCNVAEHEKLILLAQLKPEKDSDEAVTYSLGKFGQRALDFYSIHVTKESTHPVKPLAQIAGNRYASGPVGKALSDACMGTIASFLSKYQDIIIEHQKVVKGNQKRLESLRELAGKENLEYPSVTLPPQPHTKEGVDAYNEVIARVRMWVNLNLWQKLKLSRDDAKPLLRLKGFPSFPLVERQANEVDWWDMVCNVKKLINEKKEDGKVFWQNLAGYKRQEALRPYLSSEEDRKKGKKFARYQLGDLLLHLEKKHGEDWGKVYDEAWERIDKKVEGLSKHIKLEEERRSEDAQSKAALTDWLRAKASFVIEGLKEADKDEFCRCELKLQKWYGDLRGKPFAIEAENSILDISGFSKQYNCAFIWQKDGVKKLNLYLIINYFKGGKLRFKKIKPEAFEANRFYTVINKKSGEIVPMEVNFNFDDPNLIILPLAFGKRQGREFIWNDLLSLETGSLKLANGRVIEKTLYNRRTRQDEPALFVALTFERREVNDSSNIKPMNLIGVDRGENIPAVIALTDPEGCPLSRFKDSLGNPTHILRIGESYKEKQRTIQAKKEVEQRRAGGYSRKYASKAKNLADDMVRNTARDLLYYAVTQDAMLIFENLSRGFGRQGKRTFMAERQYTRMEDWLTAKLAYEGLPSKTYLSKTLAQYTSKTCSNCGFTITSADYDRVLEKLKKTATGWMTTINGKELKVEGQITYYNRYKRQNVVKDLSVELDRLSEESVNNDISSWTKGRSGEALSLLKKRFSHRPVQEKFVCLNCGFETHADEQAALNIARSWLFLRSQEYKKYQTNKTTGNTDKRAFVETWQSFYRKKLKEVWKPAV

SEQ ID NO: 43902 - protein, 979 aa, Artificial Sequence
  CasX Variant
QEIKRINKIRRRLVKDSNTKKAGKTGPMKTLLVRVMTPDLRERLENLRKKPENIPQPISNTSRANLNKLLTDYTEMKKAILHVYWEEFQKDPVGLMSRVAQPASKKIDQNKLKPEMDEKGNLTTAGFACSQCGQPLFVYKLEQVSEKGKAYTNYFGRCNVAEHEKLILLAQLKPEKDSDEAVTYSLGKFGQRALDFYSIHVTKESTHPVKPLAQIAGNRYASGPVGKALSDACMGTIASFLSKYQDIIIEHQKVVKGNQKRLESLRELAGKENLEYPSVTLPPQPHTKEGVDAYNEVIARVRMWVNLNLWQKLKLSRDDAKPLLRLKGFPSFPLVERQANEVDWWDMVCNVKKLINEKKEDGKVFWQNLAGYKRQEALRPYLSSEEDRKKGKKFARYQLGDLLLHLEKKHGEDWGKVYDEAWERIDKKVEGLSKHIKLEEERRSEDAQSKAALTDWLRAKASFVIEGLKEADKDEFCRCELKLQKWYGDLRGKPFAIEAENSILDISGFSKQYNCAFIWQKDGVKKLNLYLIINYFKGGKLRFKKIKPEAFEANRFYTVINKKSGEIVPMEVNFNFDDPNLIILPLAFGKRQGREFIWNDLLSLETGSLKLANGRVIEKTLYNRRTRQDEPALFVALTFERREVLDSSNIKPMNLIGVDRGENIPAVIALTDPEGCPLSRFKDSLGNPTHILRIGESYKEKQRTIQAKKEVEQRRAGGYSRKYASKAKNLADDMVRNTARDLLYYAVTQDAMLIFENLSRGFGRQGKRTFMAERQYTRMEDWLTAKLAYEGLPSGKTYLSKTLAQYTSKTCSNCGFTITSADYDRVLEKLKKTATGWMTTINGKELKVEGQITYYNRYKRQNVVKDLSVELDRLSEESVNNDISSWTKGRSGEALSLLKKRFSHRPVQEKFVCLNCGFETHADEQAALNIARSWLFLRSQEYKKYQTNKTTGNTDKRAFVETWQSFYRKKLKEVWKPAV

SEQ ID NO: 43903 - protein, 978 aa, Artificial Sequence
  CasX Variant
QEIKRINKIRRRLVKDSNTKKAGKTGPMKTLLVRVMTPDLRERLENLRKKPENIPQPISNTSRANLNKLLTDYTEMKKAILHVYWEEFQKDPVGLMSRVAQPASKKIDQNKLKPEMDEKGNLTTAGFACSQCGQPLFVYKLEQVSEKGKAYTNYFGRCNVAEHEKLILLAQLKPEKDSDEAVTYSLGKFGQRALDFYSIHVTKESTHPVKPLAQIAGNRYASGPVGKALSDACMGTIASFLSKYQDIIIEHQKVVKGNQKRLESLRELAGKENLEYPSVTLPPQPHTKEGVDAYNEVIARVRMWVNLNLWQKLKLSRDDAKPLLRLKGFPSFPLVERQANEVDWWDMVCNVKKLINEKKEDGKVFWQNLAGYKRQEALRPYLSSEEDRKKGKKFARYQLGDLLLHLEKKHGEDWGKVYDEAWERIDKKVEGLSKHIKLEEERRSEDAQSKAALTDWLRAKASFVIEGLKEADKDEFCRCELKLQKWYGDLRGKPFAIEAENSILDISGFSKQYNCAFIWQKDGVKKLNLYLIINYFKGGKLRFKKIKPEAFEANRFYTVINKKSGEIVPMEVNFNFDDPNLIILPLAFGKRQGREFIWNDLLSLETGSLKLANGRVIEKTLYNRRTRQDEPALFVALTFERREVLDSSNIKPMNLIGVDRGENIPAVIALTDPEGCPLSRFKDSLGNPTHILRIGESYKEKQRTIQAKKEVEQRRAGGYSRKYASKAKNLADDMVRNTARDLLYYAVTQDAMLIFENLSRGFGRQGKRTFMAERQYTRMEDWLTAKLAYEGLPSKTYLSKTLAQYTSKTCSNCGFTITSADYDRMLEKLKKTATGWMTTINGKELKVEGQITYYNRYKRQNVVKDLSVELDRLSEESVNNDISSWTKGRSGEALSLLKKRFSHRPVQEKFVCLNCGFETHADEQAALNIARSWLFLRSQEYKKYQTNKTTGNTDKRAFVETWQSFYRKKLKEVWKPAV

SEQ ID NO: 43904 - protein, 978 aa, Artificial Sequence
  CasX Variant
QEIKRINKIRRRLVKDSNTKKAGKTGPMKTLLVRVMTPDLRERLENLRKKPENIPQPISNTSRANLNKLLTDYTEMKKAILHVYWEEFQKDPVGLMSRVAQPASKKIDQNKLKPEMDEKGNLTTAGFACSQCGQPLFVYKLEQVSEKGKAYTNYFGRCNVAEHEKLILLAQLKPEKDSDEAVTYSLGKFGQRALDFYSIHVTKESTHPVKPLAQIAGNRYASGPVGKALSDACMGTIASFLSKYQDIIIEHQKVVKGNQKRLESLRELAGKENLEYPSVTLPPQPHTKEGVDAYNEVIARVRMWVNLNLWQKLKLSRDDAKPLLRLKGFPSFPLVERQANEVDWWDMVCNVKKLINEKKEDGKVFWQNLAGYKRQEALRPYLSSEEDRKKGKKFARYQLGDLLLHLEKKHGEDWGKVYDEAWERIDKKVEGLSKHIKLEEERRSEDAQSKAALTDWLRAKASFVIEGLKEADKDEFCRCELKLQKWYGDLRGKPFAIEAENSILDISGFSKQYNCAFIWQKDGVKKLNLYLIINYFKGGKLRFKKIKPEAFEANRFYTVINKKSGEIVPMEVNFNFDDPNLIILPLAFGKRQGREFIWNDLLSLETGSLKLANGRVIEKTLYNRRTRQDEPALFVALTFERREVLDSSNIKPMNLIGVDRGENIPAVIALTDPEGCPLSRFKDSLGNPTHILRIGESYKEKQRTIQAKKEVEQRRAGGYSRKYASKAKNLADDMVRNTARDLLYYAVTQDAMLIFENLSRGFGRQGKRTFMAERQYTRMEDWLTAKLAYEGLPSKTYLSKTLAQYTSKTCSNCGFTITSADYDRVLEKLKKTATGWMTTINGKELKVEGQITYYNRYKRQNVVKDLSVELDRLSEESVNNDISSWTKGRQGEALSLLKKRFSHRPVQEKFVCLNCGFETHADEQAALNIARSWLFLRSQEYKKYQTNKTTGNTDKRAFVETWQSFYRKKLKEVWKPAV

SEQ ID NO: 43905 - protein, 978 aa, Artificial Sequence
  CasX Variant
QEIKRINKIRRRLVKDSNTKKAGKTGPMKTLLVRVMTPDLRERLENLRKKPENIPQPISNTSRANLNKLLTDYTEMKKAILHVYWEEFQKDPVGLMSRVAQPASKKIDQNKLKPEMDEKGNLTTAGFACSQCGQPLFVYKLEQVSEKGKAYTNYFGRCNVAEHEKLILLAQLKPEKDSDEAVTYSLGKFGQRALDFYSIHVTKESTHPVKPLAQIAGNRYASGPVGKALSDACMGTIASFLSKYQDIIIEHQKVVKGNQKRLESLRELAGKENLEYPSVTLPPQPHTKEGVDAYNEVIARVRMWVNLNLWQKLKLSRDDAKPLLRLKGFPSFPLVERQANEVDWWDMVCNVKKLINEKKEDGKVFWQNLAGYKRQEALRPYLSSEEDRKKGKKFARYQLGDLLLHLEKKHGEDWGKVYDEAWERIDKKVEGLSKHIKLEEERRSEDAQSKAALTDWLRAKASFVIEGLKEADKDEFCRCELKLQKWYGDLRGKPFAIEAENSILDISGFSKQYNCAFIWQKDGVKKLNLYLIINYFKGGKLRFKKIKPEAFEANRFYTVINKKSGEIVPMEVNFNFDDPNLIILPLAFGKRQGREFIWNDLLSLETGSLKLANGRVIEKTLYNRRTRQDEPALFVALTFERREVLDSSNIKPMNLIGVDRGENIPAVIALTDPEGCPLSRFKDSLGNPTHILRIGESYKEKQRTIQAKKEVEQRRAGGYSRKYASKAKNLADDMVRNTARDLLYYAVTQDAMLIFENLSRGFGRQGKRTFMAERQYTRMEDWLTAKLAYEGLPSKTYLSKTLAQYTSKTCSNCGFTITSADYDRVLEKLKKTATGWMTTINGKELKVEGQITYYNRYKRQNVVKDLSVELDRLSEESVNNDISSWTKGRSGEALSLLKKRFSHRPVQEKFVCLNCEFETHADEQAALNIARSWLFLRSQEYKKYQTNKTTGNTDKRAFVETWQSFYRKKLKEVWKPAV

SEQ ID NO: 43906 - protein, 979 aa, Artificial Sequence
  CasX Variant
QEIKRINKIRRRLVKDSNTKKAGKTGPMKTLLVRVMTPDLRERLENLRKKPENIPQPISNTSRANLNKLLTDYTEMKKAILHVYWEEFQKDPVGLMSRVAQPASKKIDQNKLKPEMDEKGNLTTAGFACSQCGQPLFVYKLEQVSEKGKAYTNYFGRCNVAEHEKLILLAQLKPEKDSDEAVTYSLGKFGQRALDFYSIHVTKESTHPVKPLAQIAGNRYASGPVGKALSDACMGTIASFLSKYQDIIIEHQKVVKGNQKRLESLRELAGKENLEYPSVTLPPQPHTKEGVDAYNEVIARVRMWVNLNLWQKLKLSRDDAKPLLRLKGFPSFPLVERQANEVDWWDMVCNVKKLINEKKEDGKVFWQNLAGYKRQEALRPYLSSEEDRKKGKKFARYQLGDLLLHLEKKHGEDWGKVYDEAWERIDKKVEGLSKHIKLEEERRSEDAQSKAALTDWLRAKASFVIEGLKEADKDEFCRCELKLQKWYGDLRGKPFAIEAENSILDISGFSKQYNCAFIWQKDGVKKLNLYLIINYFKGGKLRFKKIKPEAFEANRFYTVINKKSGEIVPMEVNFNFDDPNLIILPLAFGKRQGREFIWNDLLSLETGSLKLANGRVIEKTLYNRRTRQDEPALFVALTFERREVLDSSNIKPMNLIGVDRGENIPAVIALTDPEGCPLSRFKDSLGNPTHILRIGESYKEKQRTIQAKKEVEQRRAGGYSRKYASKAKNLADDMVRNTARDLLYYAVTQDAMLIFENLSRGFGRQGKRTFMAERQYTRMEDWLTAKLAYEGLPSKTYLSKTLAQYTSKTCSNCGFTITSADYDRVLEKLKKTATGWMTTINGKELKVEGQITYYNRYKRQNVVKDLSVELDRLSEESVNNDISSWTKGRSGEALSLLKKRFSHRPVQEKFVCLNCGFETHADEQAALNIARSWLFLRSQEYKKYQTNKTSTGNTDKRAFVETWQSFYRKKLKEVWKPAV

SEQ ID NO: 43907 - protein, 979 aa, Artificial Sequence
  CasX Variant
QEIKRINKIRRRLVKDSNTKKAGKTGPMKTLLVRVMTPDLRERLENLRKKPENIPQPISNTSRANLNKLLTDYTEMKKAILHVYWEEFQKDPVGLMSRVAQPASKKIDQNKLKPEMDEKGNLTTAGFACSQCGQPLFVYKLEQVSEKGKAYTNYFGRCNVAEHEKLILLAQLKPEKDSDEAVTYSLGKFGQRALDFYSIHVTKESTHPVKPLAQIAGNRYASGPVGKALSDACMGTIASFLSKYQDIIIEHQKVVKGNQKRLESLRELAGKENLEYPSVTLPPQPHTKEGVDAYNEVIARVRMWVNLNLWQKLKLSRDDAKPLLRLKGFPSFPLVERQANEVDWWDMVCNVKKLINEKKEDGKVFWQNLAGYKRQEALRPYLSSEEDRKKGKKFARYQLGDLLLHLEKKHGEDWGKVYDEAWERIDKKVEGLSKHIKLEEERRSEDAQSKAALTDWLRAKASFVIEGLKEADKDEFCRCELKLQKWYGDLRGKPFAIEAENSILDISGFSKQYNCAFIWQKDGVKKLNLYLIINYFKGGKLRFKKIKPEAFEANRFYTVINKKSGEIVPMEVNFNFDDPNLIILPLAFGKRQGREFIWNDLLSLETGSLKLANGRVIEKTLYNRRTRQDEPALFVALTFERREVLDSSNIKPMNLIGVDRGENIPAVIALTDPEGCPLSRFKDSLGNPTHILRIGESYKEKQRTIQAKKEVEQRRAGGYSRKYASKAKNLADDMVRNTARDLLYYAVTQDAMLIFENLSRGFGRQGKRTFMAERQYTRMEDWLTAKLAYEGLPSKTYLSKTLAQYTSKTCSNCGFTITSADYDRVLEKLKKTATGWMTTINGKELKVEGQITYYNRYKRQNVVKDLSVELDRLSEESVNNDISSWTKGRSGEALSLLKKRFSHRPVQEKFVCLNCGFETHADEQAALNIARSWLFLRSQEYKKYQTNKTTGKNTDKRAFVETWQSFYRKKLKEVWKPAV

SEQ ID NO: 43908 - protein, 24 aa, Artificial Sequence
  nuclear localization signal
SRRRKANPTKLSENAKKLAKEVEN

SEQ ID NO: 43909 - protein, 11 aa, Artificial Sequence
  nuclear localization signal
PAKRARRGYKC

SEQ ID NO: 43910 - protein, 11 aa, Artificial Sequence
  nuclear localization signal
KLGPRKATGRW

SEQ ID NO: 43911 - protein, 7 aa, Artificial Sequence
  nuclear localization signal
PRRKREE

SEQ ID NO: 43912 - protein, 7 aa, Artificial Sequence
  nuclear localization signal
PYRGRKE

SEQ ID NO: 43913 - protein, 8 aa, Artificial Sequence
  nuclear localization signal
PLRKRPRR

SEQ ID NO: 43914 - protein, 18 aa, Artificial Sequence
  nuclear localization signal
PLRKRPRRGSPLRKRPRR

SEQ ID NO: 43915 - protein, 29 aa, Artificial Sequence
  nuclear localization signal
PAAKRVKLDGGKRTADGSEFESPKKKRKV

SEQ ID NO: 43916 - protein, 37 aa, Artificial Sequence
  nuclear localization signal
PAAKRVKLDGGKRTADGSEFESPKKKRKVGIHGVPAA

SEQ ID NO: 43917 - protein, 46 aa, Artificial Sequence
  nuclear localization signal
PAAKRVKLDGGKRTADGSEFESPKKKRKVAEAAAKEAAAKEAAAKA

SEQ ID NO: 43918 - protein, 31 aa, Artificial Sequence
  nuclear localization signal
PAAKRVKLDGGKRTADGSEFESPKKKRKVPG

SEQ ID NO: 43919 - protein, 15 aa, Artificial Sequence
  nuclear localization signal
KRKGSPERGERKRHW

SEQ ID NO: 43920 - protein, 28 aa, Artificial Sequence
  nuclear localization signal
KRTADSQHSTPPKTKRKVEFEPKKKRKV

SEQ ID NO: 43921 - protein, 38 aa, Artificial Sequence
  nuclear localization signal
PKKKRKVGGSKRTADSQHSTPPKTKRKVEFEPKKKRKV

SEQ ID NO: 43922 - protein, 5 aa, Artificial Sequence
  linker
  SITE (2)..(5): individual amino acid residues may be present or absent
GGGGG

SEQ ID NO: 43923 - protein, 10 aa, Artificial Sequence
  linker
  SITE (3)..(4): grouped amino acid residues may be present or absent
  SITE (5)..(6): grouped amino acid residues may be present or absent
  SITE (7)..(8): grouped amino acid residues may be present or absent
  SITE (9)..(10): grouped amino acid residues may be present or absent
GSGSGSGSGS

SEQ ID NO: 43924 - protein, 25 aa, Artificial Sequence
  linker
  SITE (6)..(10): grouped amino acid residues may be present or absent
  SITE (11)..(15): grouped amino acid residues may be present or absent
  SITE (16)..(20): grouped amino acid residues may be present or absent
  SITE (21)..(25): grouped amino acid residues may be present or absent
GSGGSGSGGSGSGGSGSGGSGSGGS

SEQ ID NO: 43925 - protein, 30 aa, Artificial Sequence
  linker
  SITE (7)..(12): grouped amino acid residues may be present or absent
  SITE (13)..(18): grouped amino acid residues may be present or absent
  SITE (19)..(24): grouped amino acid residues may be present or absent
  SITE (25)..(30): grouped amino acid residues may be present or absent
GGSGGSGGSGGSGGSGGSGGSGGSGGSGGS

SEQ ID NO: 43926 - protein, 4 aa, Artificial Sequence
  linker
PPPG

SEQ ID NO: 43927 - protein, 23 aa, Artificial Sequence
  linker
  SITE (8)..(11): grouped amino acid residues may be present or absent
  SITE (12)..(15): grouped amino acid residues may be present or absent
  SITE (16)..(19): grouped amino acid residues may be present or absent
  SITE (20)..(23): grouped amino acid residues may be present or absent
PPPGGGSGGGSGGGSGGGSGGGS

SEQ ID NO: 43928 - protein, 23 aa, Artificial Sequence
  linker
  SITE (1)..(4): grouped amino acid residues may be present or absent
  SITE (5)..(8): grouped amino acid residues may be present or absent
  SITE (9)..(12): grouped amino acid residues may be present or absent
  SITE (13)..(16): grouped amino acid residues may be present or absent
GGGSGGGSGGGSGGGSGGGSPPP

SEQ ID NO: 43929 - protein, 17 aa, Artificial Sequence
  linker
AEAAAKEAAAKEAAAKA

SEQ ID NO: 43930 - protein, 12 aa, Artificial Sequence
  linker
TPPKTKRKVEFE

SEQ ID NO: 43931 - RNA, 31 nt, Artificial Sequence
  Rev response element
ugggcgcagcgucaaugacgcugacgguaca

SEQ ID NO: 43932 - RNA, 66 nt, Artificial Sequence
  Rev response element
gcacuaugggcgcagcgucaaugacgcugacgguacaggccagacaauuauugucugguauagugc

SEQ ID NO: 43933 - RNA, 167 nt, Artificial Sequence
  Rev response element
caggaagcacuaugggcgcagcgucaaugacgcugacgguacaggccagacaauuauugucugguauagugcagcagcagaacaauuugcugagggcuauugaggcgcaacagcaucuguugcaacucacagucuggggcaucaagcagcuccaggcaagaauccug

SEQ ID NO: 43934 - RNA, 234 nt, Artificial Sequence
  Rev response element
aggagcuuuguuccuuggguucuugggagcagcaggaagcacuaugggcgcagcgucaaugacgcugacgguacaggccagacaauuauugucugguauagugcagcagcagaacaauuugcugagggcuauugaggcgcaacagcaucuguugcaacucacagucuggggcaucaagcagcuccaggcaagaauccuggcuguggaaagauaccuaaaggaucaacagcuccu

SEQ ID NO: 43935 - protein, 979 aa, Artificial Sequence
  CasX Variant
QEIKRINKIRRRLVKDSNTKKAGKTRGPMKTLLVRVMTPDLRERLENLRKKPENIPQPISNTSRANLNKLLTDYTEMKKAILHVYWEEFQKDPVGLMSRVAQPASKKIDQNKLKPEMDEKGNLTTAGFACSQCGQPLFVYKLEQVSEKGKAYTNYFGRCNVAEHEKLILLAQLKPEKDSDEAVTYSLGKFGQRALDFYSIHVTKESTHPVKPLAQIAGNRYASSPVGKALSGACMGTIASFLSKYQDIIIEHQKVVKGNQKRLESLRELAGKENLEYPSVTLPPQPHTKEGVDAYNEVIARVRMWVNLNLWQKLKLSRDDAKPLLRLKGFPSFPLVERQANEVDWWDMVCNVKKLINEKKEDGKVFWQNLAGYKRQEALRPYLSSEEDRKKGKKFARYQLGDLLLHLEKKHGEDWGKVYDEAWERIDKKVEGLSKHIKLEEERRSEDAQSKAALTDWLRAKASFVIEGLKEADKDEFCRCELKLQKWYGDLRGKPFAIEAENSILDISGFSKQYNCAFIWQKDGVKKLNLYLIINYFKGGKLRFKKIKPEAFEANRFYTVINKKSGEIVPMEVNFNFDDPNLIILPLAFGKRQGREFIWNDLLSLETGSLKLANGRVIEKTLYNRRTRQDEPALFVALTFERREVLDSSNIKPMNLIGVDRGENIPAVIALTDPEGCPLSRFKDSLGNPTHILRIGESYKEKQRTIQAKKEVEQRRAGGYSRKYASKAKNLADDMVRNTARDLLYYAVTQDAMLIFENLSRGFGRQGKRTFMAERQYTRMEDWLTAKLAYEGLPSKTYLSKTLAQYTSKTCSNCGFTITSADYDRVLEKLKKTATGWMTTINGKELKVEGQITYYNRYKRQNVVKDLSVELDRLSEESVNNDISSWTKGRSGEALSLLKKRFSHRPVQEKFVCLNCGFETHADEQAALNIARSWLFLRSQEYKKYQTNKTTGNTDKRAFVETWQSFYRKKLKEVWKPAV

SEQ ID NO: 43936 - DNA, 2931 bp, Artificial Sequence; identical to SEQ ID NO: 213
  CasX Variant

SEQ ID NO: 43937 - DNA, 2931 bp, Artificial Sequence; identical to SEQ ID NO: 215
  CasX Variant

SEQ ID NO: 43938 - DNA, 2934 bp, Artificial Sequence; identical to SEQ ID NO: 187
  CasX Variant

SEQ ID NO: 43939 - DNA, 2934 bp, Artificial Sequence; identical to SEQ ID NO: 189
  CasX Variant

SEQ ID NO: 43940 - DNA, 2934 bp, Artificial Sequence
  CasX Variant
caagagatcaagagaatcaacaagatcagaaggagactggtcaaggacagcaacacaaagaaggccggcaagacaggccccatgaaaaccctgctcgtcagagtgatgacccctgacctgagagagcggctggaaaacctgagaaagaagcccgagaacatccctcagcctatcagcaacaccagcagggccaacctgaacaagctgctgaccgactacaccgagatgaagaaagccatcctgcacgtgtactgggaagagttccagaaagaccccgtgggcctgatgagcagagttgctcagcctgccagcaagaagatcgaccagaacaagctgaagcccgagatggacgagaagggcaatctgaccacagccggctttgcctgctctcagtgtggccagcctctgttcgtgtacaagctggaacaggtgtccgagaaaggcaaggcctacaccaactacttcggcagatgtaacgtggccgagcacgagaagctgattctgctggcccagctgaaacctgagaaggactctgatgaggccgtgacctacagcctgggcaagtttggacagagagccctggacttctacagcatccacgtgaccaaagaaagcacacaccccgtgaagcccctggctcagatcgccggcaatagatacgcctcttcccctgtgggcaaagccctgtccgatgcctgcatgggaacaatcgccagcttcctgagcaagtaccaggacatcatcatcgagcaccagaaggtggtcaagggcaaccagaagagactggaaagcctgagggagctggccggcaaagagaacctggaataccccagcgtgaccctgcctcctcagcctcacacaaaagaaggcgtggacgcctacaacgaagtgatcgccagagtgagaatgtgggtcaacctgaacctgtggcagaagctgaaactgtccagggacgacgccaagcctctgctgagactgaagggcttccctagcttccctctggtggaaagacaggccaatgaagtggattggtgggacatggtctgcaacgtgaagaagctgatcaacgagaagaaagaggatggcaaggttttctggcagaacctggccggctacaagagacaagaagccctgaggccttacctgagcagcgaagaggaccggaagaagggcaagaagttcgccagataccagctgggcgacctgctgctgcacctggaaaagaagcacggcgaggactggggcaaagtgtacgatgaggcctgggagagaatcgacaagaaggtggaaggcctgagcaagcacattaagctggaagaggaaagaaggagcgaggacgcccaatctaaagccgctctgaccgattggctgagagccaaggccagctttgtgatcgagggcctgaaagaggccgacaaggacgagttctgcagatgcgagctgaagctgcagaagtggtacggcgatctgagaggcaagcccttcgccattgaggccgagaacagcatcctggacatcagcggcttcagcaagcagtacaactgcgccttcatttggcagaaagacggcgtcaagaaactgaacctgtacctgatcatcaattacttcaaaggcggcaagctgcggttcaagaagatcaaacccgaggccttcgaggctaacagattctacaccgtgatcaacaaaaagtccggcgagatcgtgcccatggaagtgaacttcaacttcgacgaccccaacctgattatcctgcctctggccttcggcaagagacagggcagagagttcatctggaacgatctgctgagcctggaaaccggctctctgaagctggccaatggcagagtgatcgagaaaaccctgtacaacaggagaaccagacaggacgagcctgctctgtttgtggccctgaccttcgagagaagagaggtgctggacagcagcaacatcaagcccatgaacctgatcggcgtggaccggggcgagaatatccctgctgtgatcgccctgacagaccctgaaggatgcccactgagcagattcaaggactccctgggcaaccctacacacatcctgagaatcggcgagagctacaaagagaagcagaggacaatccaggccaagaaagaggtggaacagagaagagccggcggatactctaggaagtacgccagcaaggccaagaatctggccgacgacatggtccgaaacaccgccagagatctgctgtactacgccgtgacacaggacgccatgctgatcttcgagaatctgagcagaggcttcggccggcagggcaagagaacctttatggccgagaggcagtacaccagaatggaagattggctcacagctaaactggcctacgagggactgcccagcaagacctacctgtccaaaacactggcccagtatacctccaagacctgcagcaattgcggcttcaccatcaccagcgccgactacgacagagtgctggaaaagctcaagaaaaccgccaccggctggatgaccaccatcaacggcaaagagctgaaggttgagggccagatcacctactacaacaggtacaagaggcagaacgtcgtgaaggatctgagcgtggaactggacagactgagcgaagagagcgtgaacaacgacatcagcagctggacaaagggcagatcaggcgaggctctgagcctgctgaagaagaggtttagccacagacctgtgcaagagaagttcgtgtgcctgaactgcggcttcgagacacacgccgatgaacaggctgccctgaacattgccagaagctggctgttcctgagaagccaagagtacaagaagtaccagaccaacaagaccaccggcaacaccgacaagagggcctttgtggaaacctggcagagcttctacagaaaaaagctgaaagaagtctggaagcccgccgtg

SEQ ID NO: 43941 - DNA, 2934 bp, Artificial Sequence
  CasX Variant
caagagatcaagagaatcaacaagatcagaaggagactggtcaaggacagcaacacaaagaaggccggcaagacaggccccatgaaaaccctgctcgtcagagtgatgacccctgacctgagagagcggctggaaaacctgagaaagaagcccgagaacatccctcagcctatcagcaacaccagcagggccaacctgaacaagctgctgaccgactacaccgagatgaagaaagccatcctgcacgtgtactgggaagagttccagaaagaccccgtgggcctgatgagcagagttgctcagcctgccagcaagaagatcgaccagaacaagctgaagcccgagatggacgagaagggcaatctgaccacagccggctttgcctgctctcagtgtggccagcctctgttcgtgtacaagctggaacaggtgtccgagaaaggcaaggcctacaccaactacttcggcagatgtaacgtggccgagcacgagaagctgattctgctggcccagctgaaacctgagaaggactctgatgaggccgtgacctacagcctgggcaagtttggacagagagccctggacttctacagcatccacgtgaccaaagaaagcacacaccccgtgaagcccctggctcagatcgccggcaatagatacgcctctacccctgtgggcaaagccctgtccgatgcctgcatgggaacaatcgccagcttcctgagcaagtaccaggacatcatcatcgagcaccagaaggtggtcaagggcaaccagaagagactggaaagcctgagggagctggccggcaaagagaacctggaataccccagcgtgaccctgcctcctcagcctcacacaaaagaaggcgtggacgcctacaacgaagtgatcgccagagtgagaatgtgggtcaacctgaacctgtggcagaagctgaaactgtccagggacgacgccaagcctctgctgagactgaagggcttccctagcttccctctggtggaaagacaggccaatgaagtggattggtgggacatggtctgcaacgtgaagaagctgatcaacgagaagaaagaggatggcaaggttttctggcagaacctggccggctacaagagacaagaagccctgaggccttacctgagcagcgaagaggaccggaagaagggcaagaagttcgccagataccagctgggcgacctgctgctgcacctggaaaagaagcacggcgaggactggggcaaagtgtacgatgaggcctgggagagaatcgacaagaaggtggaaggcctgagcaagcacattaagctggaagaggaaagaaggagcgaggacgcccaatctaaagccgctctgaccgattggctgagagccaaggccagctttgtgatcgagggcctgaaagaggccgacaaggacgagttctgcagatgcgagctgaagctgcagaagtggtacggcgatctgagaggcaagcccttcgccattgaggccgagaacagcatcctggacatcagcggcttcagcaagcagtacaactgcgccttcatttggcagaaagacggcgtcaagaaactgaacctgtacctgatcatcaattacttcaaaggcggcaagctgcggttcaagaagatcaaacccgaggccttcgaggctaacagattctacaccgtgatcaacaaaaagtccggcgagatcgtgcccatggaagtgaacttcaacttcgacgaccccaacctgattatcctgcctctggccttcggcaagagacagggcagagagttcatctggaacgatctgctgagcctggaaaccggctctctgaagctggccaatggcagagtgatcgagaaaaccctgtacaacaggagaaccagacaggacgagcctgctctgtttgtggccctgaccttcgagagaagagaggtgctggacagcagcaacatcaagcccatgaacctgatcggcgtggaccggggcgagaatatccctgctgtgatcgccctgacagaccctgaaggatgcccactgagcagattcaaggactccctgggcaaccctacacacatcctgagaatcggcgagagctacaaagagaagcagaggacaatccaggccaagaaagaggtggaacagagaagagccggcggatactctaggaagtacgccagcaaggccaagaatctggccgacgacatggtccgaaacaccgccagagatctgctgtactacgccgtgacacaggacgccatgctgatcttcgagaatctgagcagaggcttcggccggcagggcaagagaacctttatggccgagaggcagtacaccagaatggaagattggctcacagctaaactggcctacgagggactgcccagcaagacctacctgtccaaaacactggcccagtatacctccaagacctgcagcaattgcggcttcaccatcaccagcgccgactacgacagagtgctggaaaagctcaagaaaaccgccaccggctggatgaccaccatcaacggcaaagagctgaaggttgagggccagatcacctactacaacaggtacaagaggcagaacgtcgtgaaggatctgagcgtggaactggacagactgagcgaagagagcgtgaacaacgacatcagcagctggacaaagggcagatcaggcgaggctctgagcctgctgaagaagaggtttagccacagacctgtgcaagagaagttcgtgtgcctgaactgcggcttcgagacacacgccgatgaacaggctgccctgaacattgccagaagctggctgttcctgagaagccaagagtacaagaagtaccagaccaacaagaccaccggcaacaccgacaagagggcctttgtggaaacctggcagagcttctacagaaaaaagctgaaagaagtctggaagcccgccgtg

SEQ ID NO: 43942 - DNA, 2934 bp, Artificial Sequence
  CasX Variant
caagagatcaagagaatcaacaagatcagaaggagactggtcaaggacagcaacacaaagaaggccggcaagacaggccccatgaaaaccctgctcgtcagagtgatgacccctgacctgagagagcggctggaaaacctgagaaagaagcccgagaacatccctcagcctatcagcaacaccagcagggccaacctgaacaagctgctgaccgactacaccgagatgaagaaagccatcctgcacgtgtactgggaagagttccagaaagaccccgtgggcctgatgagcagagttgctcagcctgccagcaagaagatcgaccagaacaagctgaagcccgagatggacgagaagggcaatctgaccacagccggctttgcctgctctcagtgtggccagcctctgttcgtgtacaagctggaacaggtgtccgagaaaggcaaggcctacaccaactacttcggcagatgtaacgtggccgagcacgagaagctgattctgctggcccagctgaaacctgagaaggactctgatgaggccgtgacctacagcctgggcaagtttggacagagagccctggacttctacagcatccacgtgaccaaagaaagcacacaccccgtgaagcccctggctcagatcgccggcaatagatacgcctctgcccctgtgggcaaagccctgtccgatgcctgcatgggaacaatcgccagcttcctgagcaagtaccaggacatcatcatcgagcaccagaaggtggtcaagggcaaccagaagagactggaaagcctgagggagctggccggcaaagagaacctggaataccccagcgtgaccctgcctcctcagcctcacacaaaagaaggcgtggacgcctacaacgaagtgatcgccagagtgagaatgtgggtcaacctgaacctgtggcagaagctgaaactgtccagggacgacgccaagcctctgctgagactgaagggcttccctagcttccctctggtggaaagacaggccaatgaagtggattggtgggacatggtctgcaacgtgaagaagctgatcaacgagaagaaagaggatggcaaggttttctggcagaacctggccggctacaagagacaagaagccctgaggccttacctgagcagcgaagaggaccggaagaagggcaagaagttcgccagataccagctgggcgacctgctgctgcacctggaaaagaagcacggcgaggactggggcaaagtgtacgatgaggcctgggagagaatcgacaagaaggtggaaggcctgagcaagcacattaagctggaagaggaaagaaggagcgaggacgcccaatctaaagccgctctgaccgattggctgagagccaaggccagctttgtgatcgagggcctgaaagaggccgacaaggacgagttctgcagatgcgagctgaagctgcagaagtggtacggcgatctgagaggcaagcccttcgccattgaggccgagaacagcatcctggacatcagcggcttcagcaagcagtacaactgcgccttcatttggcagaaagacggcgtcaagaaactgaacctgtacctgatcatcaattacttcaaaggcggcaagctgcggttcaagaagatcaaacccgaggccttcgaggctaacagattctacaccgtgatcaacaaaaagtccggcgagatcgtgcccatggaagtgaacttcaacttcgacgaccccaacctgattatcctgcctctggccttcggcaagagacagggcagagagttcatctggaacgatctgctgagcctggaaaccggctctctgaagctggccaatggcagagtgatcgagaaaaccctgtacaacaggagaaccagacaggacgagcctgctctgtttgtggccctgaccttcgagagaagagaggtgctggacagcagcaacatcaagcccatgaacctgatcggcgtggaccggggcgagaatatccctgctgtgatcgccctgacagaccctgaaggatgcccactgagcagattcaaggactccctgggcaaccctacacacatcctgagaatcggcgagagctacaaagagaagcagaggacaatccaggccaagaaagaggtggaacagagaagagccggcggatactctaggaagtacgccagcaaggccaagaatctggccgacgacatggtccgaaacaccgccagagatctgctgtactacgccgtgacacaggacgccatgctgatcttcgagaatctgagcagaggcttcggccggcagggcaagagaacctttatggccgagaggcagtacaccagaatggaagattggctcacagctaaactggcctacgagggactgcccagcaagacctacctgtccaaaacactggcccagtatacctccaagacctgcagcaattgcggcttcaccatcaccagcgccgactacgacagagtgctggaaaagctcaagaaaaccgccaccggctggatgaccaccatcaacggcaaagagctgaaggttgagggccagatcacctactacaacaggtacaagaggcagaacgtcgtgaaggatctgagcgtggaactggacagactgagcgaagagagcgtgaacaacgacatcagcagctggacaaagggcagatcaggcgaggctctgagcctgctgaagaagaggtttagccacagacctgtgcaagagaagttcgtgtgcctgaactgcggcttcgagacacacgccgatgaacaggctgccctgaacattgccagaagctggctgttcctgagaagccaagagtacaagaagtaccagaccaacaagaccaccggcaacaccgacaagagggcctttgtggaaacctggcagagcttctacagaaaaaagctgaaagaagtctggaagcccgccgtg

SEQ ID NO: 43943 - DNA, 2934 bp, Artificial Sequence
  CasX Variant
caagagatcaagagaatcaacaagatcagaaggagactggtcaaggacagcaacacaaagaaggccggcaagacaggccccatgaaaaccctgctcgtcagagtgatgacccctgacctgagagagcggctggaaaacctgagaaagaagcccgagaacatccctcagcctatcagcaacaccagcagggccaacctgaacaagctgctgaccgactacaccgagatgaagaaagccatcctgcacgtgtactgggaagagttccagaaagaccccgtgggcctgatgagcagagttgctcagcctgccagcaagaagatcgaccagaacaagctgaagcccgagatggacgagaagggcaatctgaccacagccggctttgcctgctctcagtgtggccagcctctgttcgtgtacaagctggaacaggtgtccgagaaaggcaaggcctacaccaactacttcggcagatgtaacgtggccgagcacgagaagctgattaagctggcccagctgaaacctgagaaggactctgatgaggccgtgacctacagcctgggcaagtttggacagagagccctggacttctacagcatccacgtgaccaaagaaagcacacaccccgtgaagcccctggctcagatcgccggcaatagatacgcctctggacctgtgggcaaagccctgtccgatgcctgcatgggaacaatcgccagcttcctgagcaagtaccaggacatcatcatcgagcaccagaaggtggtcaagggcaaccagaagagactggaaagcctgagggagctggccggcaaagagaacctggaataccccagcgtgaccctgcctcctcagcctcacacaaaagaaggcgtggacgcctacaacgaagtgatcgccagagtgagaatgtgggtcaacctgaacctgtggcagaagctgaaactgtccagggacgacgccaagcctctgctgagactgaagggcttccctagcttccctctggtggaaagacaggccaatgaagtggattggtgggacatggtctgcaacgtgaagaagctgatcaacgagaagaaagaggatggcaaggttttctggcagaacctggccggctacaagagacaagaagccctgaggccttacctgagcagcgaagaggaccggaagaagggcaagaagttcgccagataccagctgggcgacctgctgctgcacctggaaaagaagcacggcgaggactggggcaaagtgtacgatgaggcctgggagagaatcgacaagaaggtggaaggcctgagcaagcacattaagctggaagaggaaagaaggagcgaggacgcccaatctaaagccgctctgaccgattggctgagagccaaggccagctttgtgatcgagggcctgaaagaggccgacaaggacgagttctgcagatgcgagctgaagctgcagaagtggtacggcgatctgagaggcaagcccttcgccattgaggccgagaacagcatcctggacatcagcggcttcagcaagcagtacaactgcgccttcatttggcagaaagacggcgtcaagaaactgaacctgtacctgatcatcaattacttcaaaggcggcaagctgcggttcaagaagatcaaacccgaggccttcgaggctaacagattctacaccgtgatcaacaaaaagtccggcgagatcgtgcccatggaagtgaacttcaacttcgacgaccccaacctgattatcctgcctctggccttcggcaagagacagggcagagagttcatctggaacgatctgctgagcctggaaaccggctctctgaagctggccaatggcagagtgatcgagaaaaccctgtacaacaggagaaccagacaggacgagcctgctctgtttgtggccctgaccttcgagagaagagaggtgctggacagcagcaacatcaagcccatgaacctgatcggcgtggaccggggcgagaatatccctgctgtgatcgccctgacagaccctgaaggatgcccactgagcagattcaaggactccctgggcaaccctacacacatcctgagaatcggcgagagctacaaagagaagcagaggacaatccaggccaagaaagaggtggaacagagaagagccggcggatactctaggaagtacgccagcaaggccaagaatctggccgacgacatggtccgaaacaccgccagagatctgctgtactacgccgtgacacaggacgccatgctgatcttcgagaatctgagcagaggcttcggccggcagggcaagagaacctttatggccgagaggcagtacaccagaatggaagattggctcacagctaaactggcctacgagggactgcccagcaagacctacctgtccaaaacactggcccagtatacctccaagacctgcagcaattgcggcttcaccatcaccagcgccgactacgacagagtgctggaaaagctcaagaaaaccgccaccggctggatgaccaccatcaacggcaaagagctgaaggttgagggccagatcacctactacaacaggtacaagaggcagaacgtcgtgaaggatctgagcgtggaactggacagactgagcgaagagagcgtgaacaacgacatcagcagctggacaaagggcagatcaggcgaggctctgagcctgctgaagaagaggtttagccacagacctgtgcaagagaagttcgtgtgcctgaactgcggcttcgagacacacgccgatgaacaggctgccctgaacattgccagaagctggctgttcctgagaagccaagagtacaagaagtaccagaccaacaagaccaccggcaacaccgacaagagggcctttgtggaaacctggcagagcttctacagaaaaaagctgaaagaagtctggaagcccgccgtg

SEQ ID NO: 43944 - DNA, 2931 bp, Artificial Sequence
  CasX Variant
caagagatcaagagaatcaacaagatcagaaggagactggtcaaggacagcaacacaaagaaggccggcaagacaggccccatgaaaaccctgctcgtcagagtgatgacccctgacctgagagagcggctggaaaacctgagaaagaagcccgagaacatccctcagcctatcagcaacaccagcagggccaacctgaacaagctgctgaccgactacaccgagatgaagaaagccatcctgcacgtgtactgggaagagttccagaaagaccccgtgggcctgatgagcagagttgctcagcctgccagcaagaagatcgaccagaacaagctgaagcccgagatggacgagaagggcaatctgaccacagccggctttgcctgctctcagtgtggccagcctctgttcgtgtacaagctggaacaggtgtccgagaaaggcaaggcctacaccaactacttcggcagatgtaacgtggccgagcacgagaagctgattctgctggcccagctgaaacctgagaaggactctgatgaggccgtgacctacagcctgggcaagtttggacagagagccctggacttctacagcatccacgtgaccaaagaaagcacacaccccgtgaagcccctggctcagatcgccggcaatagatacgcctctggacctgtgggcaaagccctgtccgatgcctgcatgggaacaatcgccagcttcctgagcaagtaccaggacatcatcatcgagcaccagaaggtggtcaagggcaaccagaagagactggaaagcctgagggagctggccggcaaagagaacctggaataccccagcgtgaccctgcctcctcagcctcacacaaaagaaggcgtggacgcctacaacgaagtgatcgccagagtgagaatgtgggtcaacctgaacctgtggcagaagctgaaactgtccagggacgacgccaagcctctgctgagactgaagggcttccctagcttccctctggtggaaagacaggccaatgaagtggattggtgggacatggtctgcaacgtgaagaagctgatcaacgagaagaaagaggatggcaaggttttctggcagaacctggccggctacaagagacaagaagccctgaggccttacctgagcagccccgaggaccggaagaagggcaagaagttcgccagataccagttcggcgacctgctgctgcacctggaaaagaagcacggcgaggactggggcaaagtgtacgatgaggcctgggagagaatcgacaagaaggtggaaggcctgagcaagcacattaagctggaagaggaaagaaggagcgaggacgcccaatctaaagccgctctgaccgattggctgagagccaaggccagctttgtgatcgagggcctgaaagaggccgacaaggacgagttctgcagatgcgagctgaagctgcagaagtggtacggcgatctgagaggcaagcccttcgccattgaggccgagaacagcatcctggacatcagcggcttcagcaagcagtacaactgcgccttcatttggcagaaagacggcgtcaagaaactgaacctgtacctgatcatcaattacttcaaaggcggcaagctgcggttcaagaagatcaaacccgaggccttcgaggctaacagattctacaccgtgatcaacaaaaagtccggcgagatcgtgcccatggaagtgaacttcaacttcgacgaccccaacctgattatcctgcctctggccttcggcaagagacagggcagagagttcatctggaacgatctgctgagcctggaaaccggctctctgaagctggccaatggcagagtgatcgagaaaaccctgtacaacaggagaaccagacaggacgagcctgctctgtttgtggccctgaccttcgagagaagagaggtgctggacagcagcaacatcaagcccatgaacctgatcggcgtggaccggggcgagaatatccctgctgtgatcgccctgacagaccctgaaggatgcccactgagcagattcaaggactccctgggcaaccctacacacatcctgagaatcggcgagagctacaaagagaagcagaggacaatccaggccaagaaagaggtggaacagagaagagccggcggatactctaggaagtacgccagcaaggccaagaatctggccaacgacatggtccgaaacaccgccagagatctgctgtactacgccgtgacacaggacgccatgctgatcttcgagaatctgagcagaggcttcggccggcagggcaagagaacctttatggccgagaggcagtacaccagaatggaagattggctcacagctaaactggcctacgagggactgagcaagacctacctgtccaaaacactggcccagtatacctccaagacctgcagcaattgcggcttcaccatcaccagcgccgactacgacagagtgctggaaaagctcaagaaaaccgccaccggctggatgaccaccatcaacggcaaagagctgaaggttgagggccagatcacctactacaacaggaggaagaggcagaacgtcgtgaaggatctgagcgtggaactggacagactgagcgaagagagcgtgaacaacgacatcagcagctggacaaagggcagatcaggcgaggctctgagcctgctgaagaagaggtttagccacagacctgtgcaagagaagttcgtgtgcctgaactgcggcttcgagacacacgccgatgaacaggctgccctgaacattgccagaagctggctgttcctgagaagccaagagtacaagaagtaccagaccaacaagaccaccggcaacaccgacaagagggcctttgtggaaacctggcagagcttctacagaaaaaagctgaaagaagtctggaagcccgccgtg

SEQ ID NO: 43945 - DNA, 2931 bp, Artificial Sequence
  CasX Variant
caagagatcaagagaatcaacaagatcagaaggagactggtcaaggacagcaacacaaagaaggccggcaagacaggccccatgaaaaccctgctcgtcagagtgatgacccctgacctgagagagcggctggaaaacctgagaaagaagcccgagaacatccctcagcctatcagcaacaccagcagggccaacctgaacaagctgctgaccgactacaccgagatgaagaaagccatcctgcacgtgtactgggaagagttccagaaagaccccgtgggcctgatgagcagagttgctcagcctgccagcaagaagatcgaccagaacaagctgaagcccgagatggacgagaagggcaatctgaccacagccggctttgcctgctctcagtgtggccagcctctgttcgtgtacaagctggaacaggtgtccgagaaaggcaaggcctacaccaactacttcggcagatgtaacgtggccgagcacgagaagctgattctgctggcccagctgaaacctgagaaggactctgatgaggccgtgacctacagcctgggcaagtttggacagagagccctggacttctacagcatccacgtgaccaaagaaagcacacaccccgtgaagcccctggctcagatcgccggcaatagatacgcctctggacctgtgggcaaagccctgtccgatgcctgcatgggaacaatcgccagcttcctgagcaagtaccaggacatcatcatcgagcaccagaaggtggtcaagggcaaccagaagagactggaaagcctgagggagctggccggcaaagagaacctggaataccccagcgtgaccctgcctcctcagcctcacacaaaagaaggcgtggacgcctacaacgaagtgatcgccagagtgagaatgtgggtcaacctgaacctgtggcagaagctgaaactgtccagggacgacgccaagcctctgctgagactgaagggcttccctagcttccctctggtggaaagacaggccaatgaagtggattggtgggacatggtctgcaacgtgaagaagctgatcaacgagaagaaagaggatggcaaggttttctggcagaacctggccggctacaagagacaagaagccctgaggccttacctgagcagcgaagaggaccggaagaagggcaagaagttcgccagataccagctgggcgacctgctgctgcacctggaaaagaagcacggcgaggactggggcaaagtgtacgatgaggcctgggagagaatcgacaagaaggtggaaggcctgagcaagcacattaagctggaagaggaaagaaggagcgaggacgcccaatctaaagccgctctgaccgattggctgagagccaaggccagctttgtgatcgagggcctgaaagaggccgacaaggacgagttcagcagatgcgagctgaagctgcagaagtggtacggcgatctgagaggcaagcccttcgccattgaggccgagaacagcatcctggacatcagcggcttcagcaagcagtacaactgcgccttcatttggcagaaagacggcgtcaagaaactgaacctgtacctgatcatcaattacttcaaaggcggcaagctgcggttcaagaagatcaaacccgaggccttcgaggctaacagattctacaccgtgatcaacaaaaagtccggcgagatcgtgcccatggaagtgaacttcaacttcgacgaccccaacctgattatcctgcctctggccttcggcaagagacagggcagagagttcatctggaacgatctgctgagcctggaaaccggctctctgaagctggccaatggcagagtgatcgagaaaaccctgtacaacaggagaaccagacaggacgagcctgctctgtttgtggccctgaccttcgagagaagagaggtgctggacagcagcaacatcaagcccatgaacctgatcggcgtggaccggggcgagaatatccctgctgtgatcgccctgacagaccctgaaggatgcccactgagcagattcaaggactccctgggcaaccctacacacatcctgagaatcggcgagagctacaaagagaagcagaggacaatccaggccaagaaagaggtggaacagagaagagccggcggatactctaggaagtacgccagcaaggccaagaatctggccgacgacatggtccgaaacaccgccagagatctgctgtactacgccgtgacacaggacgccatgctgatcttcgagaatctgagcagaggcttcggccggcagggcaagagaacctttatggccgagaggcagtacaccagaatggaagattggctcacagctaaactggcctacgagggactgagcaagacctacctgtccaaaacactggcccagtatacctccaagacctgcagcaattgcggcttcaccatcaccagcgccgactacgacagagtgctggaaaagctcaagaaaaccgccaccggctggatgaccaccatcaacggcaaagagctgaaggttgagggccagatcacctactacaacaggaggaagaggcagaacgtcgtgaaggatctgagcgtggaactggacagactgagcgaagagagcgtgaacaacgacatcagcagctggacaaagggcagatcaggcgaggctctgagcctgctgaagaagaggtttagccacagacctgtgcaagagaagttcgtgtgcctgaactgcggcttcgagacacacgccgatgaacaggctgccctgaacattgccagaagctggctgttcctgagaagccaagagtacaagaagtaccagaccaacaagaccaccggcaacaccgacaagagggcctttgtggaaacctggcagagcttctacagaaaaaagctgaaagaagtctggaagcccgccgtg

SEQ ID NO: 43946 - DNA, 2931 bp, Artificial Sequence
  CasX Variant
caagagatcaagagaatcaacaagatcagaaggagactggtcaaggacagcaacacaaagaaggccggcaagacaggccccatgaaaaccctgctcgtcagagtgatgacccctgacctgagagagcggctggaaaacctgagaaagaagcccgagaacatccctcagcctatcagcaacaccagcagggccaacctgaacaagctgctgaccgactacaccgagatgaagaaagccatcctgcacgtgtactgggaagagttccagaaagaccccgtgggcctgatgagcagagttgctcagcctgccagcaagaagatcgaccagaacaagctgaagcccgagatggacgagaagggcaatctgaccacagccggctttgcctgctctcagtgtggccagcctctgttcgtgtacaagctggaacaggtgtccgagaaaggcaaggcctacaccaactacttcggcagatgtaacgtggccgagcacgagaagctgattctgctggcccagctgaaacctgagaaggactctgatgaggccgtgacctacagcctgggcaagtttggacagagagccctggacttctacagcatccacgtgaccaaagaaagcacacaccccgtgaagcccctggctcagatcgccggcaatagatacgcctctggacctgtgggcaaagccctgtccgatgcctgcatgggaacaatcgccagcttcctgagcaagtaccaggacatcatcatcgagcaccagaaggtggtcaagggcaaccagaagagactggaaagcctgagggagctggccggcaaagagaacctggaataccccagcgtgaccctgcctcctcagcctcacacaaaagaaggcgtggacgcctacaacgaagtgatcgccagagtgagaatgtgggtcaacctgaacctgtggcagaagctgaaactgtccagggacgacgccaagcctctgctgagactgaagggcttccctagcttccctctggtggaaagacaggccaatgaagtggattggtgggacatggtctgcaacgtgaagaagctgatcaacgagaagaaagaggatggcaaggttttctggcagaacctggccggctacaagagacaagaagccctgaggccttacctgagcagcgaaaacgaccggaagaagggcaagaagttcgccagataccagttcggcgacctgctgaagcacctggaaaagaagcacggcgaggactggggcaaagtgtacgatgaggcctgggagagaatcgacaagaaggtggaaggcctgagcaagcacattaagctggaagaggaaagaaggagcgaggacgcccaatctaaagccgctctgaccgattggctgagagccaaggccagctttgtgatcgagggcctgaaagaggccgacaaggacgagttcagcagatgcgagctgaagctgcagaagtggtacggcgatctgagaggcaagcccttcgccattgaggccgagaacagcatcctggacatcagcggcttcagcaagcagtacaactgcgccttcatttggcagaaagacggcgtcaagaaactgaacctgtacctgatcatcaattacttcaaaggcggcaagctgcggttcaagaagatcaaacccgaggccttcgaggctaacagattctacaccgtgatcaacaaaaagtccggcgagatcgtgcccatggaagtgaacttcaacttcgacgaccccaacctgattatcctgcctctggccttcggcaagagacagggcagagagttcatctggaacgatctgctgagcctggaaaccggctctctgaagctggccaatggcagagtgatcgagaaaaccctgtacaacaggagaaccagacaggacgagcctgctctgtttgtggccctgaccttcgagagaagagaggtgctggacagcagcaacatcaagcccatgaacctgatcggcgtggaccggggcgagaatatccctgctgtgatcgccctgacagaccctgaaggatgcccactgagcagattcaaggactccctgggcaaccctacacacatcctgagaatcggcgagagctacaaagagaagcagaggacaatccaggccaagaaagaggtggaacagagaagagccggcggatactctaggaagtacgccagcaaggccaagaatctggccgacgacatggtccgaaacaccgccagagatctgctgtactacgccgtgacacaggacgccatgctgatcttcgagaatctgagcagaggcttcggccggcagggcaagagaacctttatggccgagaggcagtacaccagaatggaagattggctcacagctaaactggcctacgagggactgagcaagaccctgctgtccaaaacactggcccagtatacctccaagacctgcagcaattgcggcttcaccatcaccagcgccgactacgacagagtgctggaaaagctcaagaaaaccgccaccggctggatgaccaccatcaacggcaaagagctgaaggttgagggccagatcacctactacaacaggaggaagaggcagaacgtcgtgaaggatctgagcgtggaactggacagactgagcgaagagagcgtgaacaacgacatcagcagctggacaaagggcagatcaggcgaggctctgagcctgctgaagaagaggtttagccacagacctgtgcaagagaagttcgtgtgcctgaactgcggcttcgagacacacgccgatgaacaggctgccctgaacattgccagaagctggctgttcctgagaagccaagagtacaagaagtaccagaccaacaagaccaccggcaacaccgacaagagggcctttgtggaaacctggcagagcttctacagaaaaaagctgaaagaagtctggaagcccgccgtg

SEQ ID NO: 43947 - DNA, 2931 bp, Artificial Sequence
  CasX Variant
caagagatcaagagaatcaacaagatcagaaggagactggtcaaggacagcaacacaaagaaggccggcaagacaggccccatgaaaaccctgctcgtcagagtgatgacccctgacctgagagagcggctggaaaacctgagaaagaagcccgagaacatccctcagcctatcagcaacaccagcagggccaacctgaacaagctgctgaccgactacaccgagatgaagaaagccatcctgcacgtgtactgggaagagttccagaaagaccccgtgggcctgatgagcagagttgctcagcctgccagcaagaagatcgaccagaacaagctgaagcccgagatggacgagaagggcaatctgaccacagccggctttgcctgctctcagtgtggccagcctctgttcgtgtacaagctggaacaggtgtccgagaaaggcaaggcctacaccaactacttcggcagatgtaacgtggccgagcacgagaagctgattctgctggcccagctgaaacctgagaaggactctgatgaggccgtgacctacagcctgggcaagtttggacagagagccctggacttctacagcatccacgtgaccaaagaaagcacacaccccgtgaagcccctggctcagatcgccggcaatagatacgcctctggacctgtgggcaaagccctgtccgatgcctgcatgggaacaatcgccagcttcctgagcaagtaccaggacatcatcatcgagcaccagaaggtggtcaagggcaaccagaagagactggaaagcctgagggagctggccggcaaagagaacctggaataccccagcgtgaccctgcctcctcagcctcacacaaaagaaggcgtggacgcctacaacgaagtgatcgccagagtgagaatgtgggtcaacctgaacctgtggcagaagctgaaactgtccagggacgacgccaagcctctgctgagactgaagggcttccctagcttccctctggtggaaagacaggccaatgaagtggattggtgggacatggtctgcaacgtgaagaagctgatcaacgagaagaaagaggatggcaaggttttctggcagaacctggccggctacaagagacaagaagccctgaggccttacctgagcagccccgaggaccggaagaagggcaagaagttcgccagataccagctgggcgacctgctgctgcacctggaaaagaagcacggcgaggactggggcaaagtgtacgatgaggcctgggagagaatcgacaagaaggtggaaggcctgagcaagcacattaagctggaagaggaaagaaggagcgaggacgcccaatctaaagccgctctgaccgattggctgagagccaaggccagctttgtgatcgagggcctgaaagaggccgacaaggacgagttctgcagatgcgagctgaagctgcagaagtggtacggcgatctgagaggcaagcccttcgccattgaggccgagaacagcatcctggacatcagcggcttcagcaagcagtacaactgcgccttcatttggcagaaagacggcgtcaagaaactgaacctgtacctgatcatcaattacttcaaaggcggcaagctgcggttcaagaagatcaaacccgaggccttcgaggctaacagattctacaccgtgatcaacaaaaagtccggcgagatcgtgcccatggaagtgaacttcaacttcgacgaccccaacctgattatcctgcctctggccttcggcaagagacagggcagagagttcatctggaacgatctgctgagcctggaaaccggctctctgaagctggccaatggcagagtgatcgagaaaaccctgtacaacaggagaaccagacaggacgagcctgctctgtttgtggccctgaccttcgagagaagagaggtgctggacagcagcaacatcaagcccatgaacctgatcggcgtggaccggggcgagaatatccctgctgtgatcgccctgacagaccctgaaggatgcccactgagcagattcaaggactccctgggcaaccctacacacatcctgagaatcggcgagagctacaaagagaagcagaggacaatccaggccaagaaagaggtggaacagagaagagccggcggatactctaggaagtacgccagcaaggccaagaatctggccaacgacatggtccgaaacaccgccagagatctgctgtactacgccgtgacacaggacgccatgctgatcttcgagaatctgagcagaggcttcggccggcagggcaagagaacctttatggccgagaggcagtacaccagaatggaagattggctcacagctaaactggcctacgagggactgagcaagacctacctgtccaaaacactggcccagtatacctccaagacctgcagcaattgcggcttcaccatcaccagcgccgactacgacagagtgctggaaaagctcaagaaaaccgccaccggctggatgaccaccatcaacggcaaagagctgaaggttgagggccagatcacctactacaacaggaggaagaggcagaacgtcgtgaaggatctgagcgtggaactggacagactgagcgaagagagcgtgaacaacgacatcagcagctggacaaagggcagatcaggcgaggctctgagcctgctgaagaagaggtttagccacagacctgtgcaagagaagttcgtgtgcctgaactgcggcttcgagacacacgccgatgaacaggctgccctgaacattgccagaagctggctgttcctgagaagccaagagtacaagaagtaccagaccaacaagaccaccggcaacaccgacaagagggcctttgtggaaacctggcagagcttctacagaaaaaagctgaaagaagtctggaagcccgccgtg

SEQ ID NO: 43948 - DNA, 2931 bp, Artificial Sequence
  CasX Variant
caagagatcaagagaatcaacaagatcagaaggagactggtcaaggacagcaacacaaagaaggccggcaagacaggccccatgaaaaccctgctcgtcagagtgatgacccctgacctgagagagcggctggaaaacctgagaaagaagcccgagaacatccctcagcctatcagcaacaccagcagggccaacctgaacaagctgctgaccgactacaccgagatgaagaaagccatcctgcacgtgtactgggaagagttccagaaagaccccgtgggcctgatgagcagagttgctcagcctgccagcaagaagatcgaccagaacaagctgaagcccgagatggacgagaagggcaatctgaccacagccggctttgcctgctctcagtgtggccagcctctgttcgtgtacaagctggaacaggtgtccgagaaaggcaaggcctacaccaactacttcggcagatgtaacgtggccgagcacgagaagctgattctgctggcccagctgaaacctgagaaggactctgatgaggccgtgacctacagcctgggcaagtttggacagagagccctggacttctacagcatccacgtgaccaaagaaagcacacaccccgtgaagcccctggctcagatcgccggcaatagatacgcctctggacctgtgggcaaagccctgtccgatgcctgcatgggaacaatcgccagcttcctgagcaagtaccaggacatcatcatcgagcaccagaaggtggtcaagggcaaccagaagagactggaaagcctgagggagctggccggcaaagagaacctggaataccccagcgtgaccctgcctcctcagcctcacacaaaagaaggcgtggacgcctacaacgaagtgatcgccagagtgagaatgtgggtcaacctgaacctgtggcagaagctgaaactgtccagggacgacgccaagcctctgctgagactgaagggcttccctagcttccctctggtggaaagacaggccaatgaagtggattggtgggacatggtctgcaacgtgaagaagctgatcaacgagaagaaagaggatggcaaggttttctggcagaacctggccggctacaagagacaagaagccctgaggccttacctgagcagccccgaggaccggaagaagggcaagaagttcgccagataccagctgggcgacctgctgctgcacctggaaaagaagcacggcgaggactggggcaaagtgtacgatgaggcctgggagagaatcgacaagaaggtggaaggcctgagcaagcacattaagctggaagaggaaagaaggagcgaggacgcccaatctaaagccgctctgaccgattggctgagagccaaggccagctttgtgatcgagggcctgaaagaggccgacaaggacgagttctgcagatgcgagctgaagctgcagaagtggtacggcgatctgagaggcaagcccttcgccattgaggccgagaacagcatcctggacatcagcggcttcagcaagcagtacaactgcgccttcatttggcagaaagacggcgtcaagaaactgaacctgtacctgatcatcaattacttcaaaggcggcaagctgcggttcaagaagatcaaacccgaggccttcgaggctaacagattctacaccgtgatcaacaaaaagtccggcgagatcgtgcccatggaagtgaacttcaacttcgacgaccccaacctgattatcctgcctctggccttcggcaagagacagggcagagagttcatctggaacgatctgctgagcctggaaaccggctctctgaagctggccaatggcagagtgatcgagaaacccctgtacaacaggagaaccagacaggacgagcctgctctgtttgtggccctgaccttcgagagaagagaggtgctggacagcagcaacatcaagcccatgaacctgatcggcgtggaccggggcgagaatatccctgctgtgatcgccctgacagaccctgaaggatgcccactgagcagattcaaggactccctgggcaaccctacacacatcctgagaatcggcgagagctacaaagagaagcagaggacaatccaggccaagaaagaggtggaacagagaagagccggcggatactctaggaagtacgccagcaaggccaagaatctggccgacgacatggtccgaaacaccgccagagatctgctgtactacgccgtgacacaggacgccatgctgatcttcgagaatctgagcagaggcttcggccggcagggcaagagaacctttatggccgagaggcagtacaccagaatggaagattggctcacagctaaactggcctacgagggactgagcaagacctacctgtccaaaacactggcccagtatacctccaagacctgcagcaattgcggcttcaccatcaccagcgccgactacgacagagtgctggaaaagctcaagaaaaccgccaccggctggatgaccaccatcaacggcaaagagctgaaggttgagggccagatcacctactacaacaggaggaagaggcagaacgtcgtgaaggatctgagcgtggaactggacagactgagcgaagagagcgtgaacaacgacatcagcagctggacaaagggcagatcaggcgaggctctgagcctgctgaagaagaggtttagccacagacctgtgcaagagaagttcgtgtgcctgaactgcggcttcgagacacacgccgatgaacaggctgccctgaacattgccagaagctggctgttcctgagaagccaagagtacaagaagtaccagaccaacaagaccaccggcaacaccgacaagagggcctttgtggaaacctggcagagcttctacagaaaaaagctgaaagaagtctggaagcccgccgtg

SEQ ID NO: 43949 - DNA, 2937 bp, Artificial Sequence
  CasX Variant
caagagatcaagagaatcaacaagatcagaaggagactggtcaaggacagcaacacaaagaaggccggcaagacacggggccccatgaaaaccctgctcgtcagagtgatgacccctgacctgagagagcggctggaaaacctgagaaagaagcccgagaacatccctcagcctatcagcaacaccagcagggccaacctgaacaagctgctgaccgactacaccgagatgaagaaagccatcctgcacgtgtactgggaagagttccagaaagaccccgtgggcctgatgagcagagttgctcagcctgccagcaagaagatcgaccagaacaagctgaagcccgagatggacgagaagggcaatctgaccacagccggctttgcctgctctcagtgtggccagcctctgttcgtgtacaagctggaacaggtgtccgagaaaggcaaggcctacaccaactacttcggcagatgtaacgtggccgagcacgagaagctgattctgctggcccagctgaaacctgagaaggactctgatgaggccgtgacctacagcctgggcaagtttggacagagagccctggacttctacagcatccacgtgaccaaagaaagcacacaccccgtgaagcccctggctcagatcgccggcaatagatacgcctcttcccctgtgggcaaagccctgtccgatgcctgcatgggaacaatcgccagcttcctgagcaagtaccaggacatcatcatcgagcaccagaaggtggtcaagggcaaccagaagagactggaaagcctgagggagctggccggcaaagagaacctggaataccccagcgtgaccctgcctcctcagcctcacacaaaagaaggcgtggacgcctacaacgaagtgatcgccagagtgagaatgtgggtcaacctgaacctgtggcagaagctgaaactgtccagggacgacgccaagcctctgctgagactgaagggcttccctagcttccctctggtggaaagacaggccaatgaagtggattggtgggacatggtctgcaacgtgaagaagctgatcaacgagaagaaagaggatggcaaggttttctggcagaacctggccggctacaagagacaagaagccctgaggccttacctgagcagcgaagaggaccggaagaagggcaagaagttcgccagataccagctgggcgacctgctgctgcacctggaaaagaagcacggcgaggactggggcaaagtgtacgatgaggcctgggagagaatcgacaagaaggtggaaggcctgagcaagcacattaagctggaagaggaaagaaggagcgaggacgcccaatctaaagccgctctgaccgattggctgagagccaaggccagctttgtgatcgagggcctgaaagaggccgacaaggacgagttctgcagatgcgagctgaagctgcagaagtggtacggcgatctgagaggcaagcccttcgccattgaggccgagaacagcatcctggacatcagcggcttcagcaagcagtacaactgcgccttcatttggcagaaagacggcgtcaagaaactgaacctgtacctgatcatcaattacttcaaaggcggcaagctgcggttcaagaagatcaaacccgaggccttcgaggctaacagattctacaccgtgatcaacaaaaagtccggcgagatcgtgcccatggaagtgaacttcaacttcgacgaccccaacctgattatcctgcctctggccttcggcaagagacagggcagagagttcatctggaacgatctgctgagcctggaaaccggctctctgaagctggccaatggcagagtgatcgagaaaaccctgtacaacaggagaaccagacaggacgagcctgctctgtttgtggccctgaccttcgagagaagagaggtgctggacagcagcaacatcaagcccatgaacctgatcggcgtggaccggggcgagaatatccctgctgtgatcgccctgacagaccctgaaggatgcccactgagcagattcaaggactccctgggcaaccctacacacatcctgagaatcggcgagagctacaaagagaagcagaggacaatccaggccaagaaagaggtggaacagagaagagccggcggatactctaggaagtacgccagcaaggccaagaatctggccgacgacatggtccgaaacaccgccagagatctgctgtactacgccgtgacacaggacgccatgctgatcttcgagaatctgagcagaggcttcggccggcagggcaagagaacctttatggccgagaggcagtacaccagaatggaagattggctcacagctaaactggcctacgagggactgcccagcaagacctacctgtccaaaacactggcccagtatacctccaagacctgcagcaattgcggcttcaccatcaccagcgccgactacgacagagtgctggaaaagctcaagaaaaccgccaccggctggatgaccaccatcaacggcaaagagctgaaggttgagggccagatcacctactacaacaggtacaagaggcagaacgtcgtgaaggatctgagcgtggaactggacagactgagcgaagagagcgtgaacaacgacatcagcagctggacaaagggcagatcaggcgaggctctgagcctgctgaagaagaggtttagccacagacctgtgcaagagaagttcgtgtgcctgaactgcggcttcgagacacacgccgatgaacaggctgccctgaacattgccagaagctggctgttcctgagaagccaagagtacaagaagtaccagaccaacaagaccaccggcaacaccgacaagagggcctttgtggaaacctggcagagcttctacagaaaaaagctgaaagaagtctggaagcccgccgtg

SEQ ID NO: 43950 - DNA, 2937 bp, Artificial Sequence
  CasX Variant
caagagatcaagagaatcaacaagatcagaaggagactggtcaaggacagcaacacaaagaaggccggcaagacacggggccccatgaaaaccctgctcgtcagagtgatgacccctgacctgagagagcggctggaaaacctgagaaagaagcccgagaacatccctcagcctatcagcaacaccagcagggccaacctgaacaagctgctgaccgactacaccgagatgaagaaagccatcctgcacgtgtactgggaagagttccagaaagaccccgtgggcctgatgagcagagttgctcagcctgccagcaagaagatcgaccagaacaagctgaagcccgagatggacgagaagggcaatctgaccacagccggctttgcctgctctcagtgtggccagcctctgttcgtgtacaagctggaacaggtgtccgagaaaggcaaggcctacaccaactacttcggcagatgtaacgtggccgagcacgagaagctgattctgctggcccagctgaaacctgagaaggactctgatgaggccgtgacctacagcctgggcaagtttggacagagagccctggacttctacagcatccacgtgaccaaagaaagcacacaccccgtgaagcccctggctcagatcgccggcaatagatacgcctcttcccctgtgggcaaagccctgtccggcgcctgcatgggaacaatcgccagcttcctgagcaagtaccaggacatcatcatcgagcaccagaaggtggtcaagggcaaccagaagagactggaaagcctgagggagctggccggcaaagagaacctggaataccccagcgtgaccctgcctcctcagcctcacacaaaagaaggcgtggacgcctacaacgaagtgatcgccagagtgagaatgtgggtcaacctgaacctgtggcagaagctgaaactgtccagggacgacgccaagcctctgctgagactgaagggcttccctagcttccctctggtggaaagacaggccaatgaagtggattggtgggacatggtctgcaacgtgaagaagctgatcaacgagaagaaagaggatggcaaggttttctggcagaacctggccggctacaagagacaagaagccctgaggccttacctgagcagcgaagaggaccggaagaagggcaagaagttcgccagataccagctgggcgacctgctgctgcacctggaaaagaagcacggcgaggactggggcaaagtgtacgatgaggcctgggagagaatcgacaagaaggtggaaggcctgagcaagcacattaagctggaagaggaaagaaggagcgaggacgcccaatctaaagccgctctgaccgattggctgagagccaaggccagctttgtgatcgagggcctgaaagaggccgacaaggacgagttctgcagatgcgagctgaagctgcagaagtggtacggcgatctgagaggcaagcccttcgccattgaggccgagaacagcatcctggacatcagcggcttcagcaagcagtacaactgcgccttcatttggcagaaagacggcgtcaagaaactgaacctgtacctgatcatcaattacttcaaaggcggcaagctgcggttcaagaagatcaaacccgaggccttcgaggctaacagattctacaccgtgatcaacaaaaagtccggcgagatcgtgcccatggaagtgaacttcaacttcgacgaccccaacctgattatcctgcctctggccttcggcaagagacagggcagagagttcatctggaacgatctgctgagcctggaaaccggctctctgaagctggccaatggcagagtgatcgagaaaaccctgtacaacaggagaaccagacaggacgagcctgctctgtttgtggccctgaccttcgagagaagagaggtgctggacagcagcaacatcaagcccatgaacctgatcggcgtggaccggggcgagaatatccctgctgtgatcgccctgacagaccctgaaggatgcccactgagcagattcaaggactccctgggcaaccctacacacatcctgagaatcggcgagagctacaaagagaagcagaggacaatccaggccaagaaagaggtggaacagagaagagccggcggatactctaggaagtacgccagcaaggccaagaatctggccgacgacatggtccgaaacaccgccagagatctgctgtactacgccgtgacacaggacgccatgctgatcttcgagaatctgagcagaggcttcggccggcagggcaagagaacctttatggccgagaggcagtacaccagaatggaagattggctcacagctaaactggcctacgagggactgcccagcaagacctacctgtccaaaacactggcccagtatacctccaagacctgcagcaattgcggcttcaccatcaccagcgccgactacgacagagtgctggaaaagctcaagaaaaccgccaccggctggatgaccaccatcaacggcaaagagctgaaggttgagggccagatcacctactacaacaggtacaagaggcagaacgtcgtgaaggatctgagcgtggaactggacagactgagcgaagagagcgtgaacaacgacatcagcagctggacaaagggcagatcaggcgaggctctgagcctgctgaagaagaggtttagccacagacctgtgcaagagaagttcgtgtgcctgaactgcggcttcgagacacacgccgatgaacaggctgccctgaacattgccagaagctggctgttcctgagaagccaagagtacaagaagtaccagaccaacaagaccaccggcaacaccgacaagagggcctttgtggaaacctggcagagcttctacagaaaaaagctgaaagaagtctggaagcccgccgtg

SEQ ID NO: 43951 - DNA, 2934 bp, Artificial Sequence
  CasX Variant
caagagatcaagagaatcaacaagatcagaaggagactggtcaaggacagcaacacaaagaaggccggcaagacaggccccatgaaaaccctgctcgtcagagtgatgacccctgacctgagagagcggctggaaaacctgagaaagaagcccgagaacatccctcagcctatcagcaacaccagcagggccaacctgaacaagctgctgaccgactacaccgagatgaagaaagccatcctgcacgtgtactgggaagagttccagaaagaccccgtgggcctgatgagcagagttgctcagcctgccagcaagaagatcgaccagaacaagctgaagcccgagatggacgagaagggcaatctgaccacagccggctttgcctgctctcagtgtggccagcctctgttcgtgtacaagctggaacaggtgtccgagaaaggcaaggcctacaccaactacttcggcagatgtaacgtggccgagcacgagaagctgattaagctggcccagctgaaacctgagaaggactctgatgaggccgtgacctacagcctgggcaagtttggacagagagccctggacttctacagcatccacgtgaccaaagaaagcacacaccccgtgaagcccctggctcagatcgccggcaatagatacgcctcttcccctgtgggcaaagccctgtccgatgcctgcatgggaacaatcgccagcttcctgagcaagtaccaggacatcatcatcgagcaccagaaggtggtcaagggcaaccagaagagactggaaagcctgagggagctggccggcaaagagaacctggaataccccagcgtgaccctgcctcctcagcctcacacaaaagaaggcgtggacgcctacaacgaagtgatcgccagagtgagaatgtgggtcaacctgaacctgtggcagaagctgaaactgtccagggacgacgccaagcctctgctgagactgaagggcttccctagcttccctctggtggaaagacaggccaatgaagtggattggtgggacatggtctgcaacgtgaagaagctgatcaacgagaagaaagaggatggcaaggttttctggcagaacctggccggctacaagagacaagaagccctgaggccttacctgagcagcgaagaggaccggaagaagggcaagaagttcgccagataccagctgggcgacctgctgctgcacctggaaaagaagcacggcgaggactggggcaaagtgtacgatgaggcctgggagagaatcgacaagaaggtggaaggcctgagcaagcacattaagctggaagaggaaagaaggagcgaggacgcccaatctaaagccgctctgaccgattggctgagagccaaggccagctttgtgatcgagggcctgaaagaggccgacaaggacgagttctgcagatgcgagctgaagctgcagaagtggtacggcgatctgagaggcaagcccttcgccattgaggccgagaacagcatcctggacatcagcggcttcagcaagcagtacaactgcgccttcatttggcagaaagacggcgtcaagaaactgaacctgtacctgatcatcaattacttcaaaggcggcaagctgcggttcaagaagatcaaacccgaggccttcgaggctaacagattctacaccgtgatcaacaaaaagtccggcgagatcgtgcccatggaagtgaacttcaacttcgacgaccccaacctgattatcctgcctctggccttcggcaagagacagggcagagagttcatctggaacgatctgctgagcctggaaaccggctctctgaagctggccaatggcagagtgatcgagaaaaccctgtacaacaggagaaccagacaggacgagcctgctctgtttgtggccctgaccttcgagagaagagaggtgctggacagcagcaacatcaagcccatgaacctgatcggcgtggaccggggcgagaatatccctgctgtgatcgccctgacagaccctgaaggatgcccactgagcagattcaaggactccctgggcaaccctacacacatcctgagaatcggcgagagctacaaagagaagcagaggacaatccaggccaagaaagaggtggaacagagaagagccggcggatactctaggaagtacgccagcaaggccaagaatctggccgacgacatggtccgaaacaccgccagagatctgctgtactacgccgtgacacaggacgccatgctgatcttcgagaatctgagcagaggcttcggccggcagggcaagagaacctttatggccgagaggcagtacaccagaatggaagattggctcacagctaaactggcctacgagggactgcccagcaagacctacctgtccaaaacactggcccagtatacctccaagacctgcagcaattgcggcttcaccatcaccagcgccgactacgacagagtgctggaaaagctcaagaaaaccgccaccggctggatgaccaccatcaacggcaaagagctgaaggttgagggccagatcacctactacaacaggtacaagaggcagaacgtcgtgaaggatctgagcgtggaactggacagactgagcgaagagagcgtgaacaacgacatcagcagctggacaaagggcagatcaggcgaggctctgagcctgctgaagaagaggtttagccacagacctgtgcaagagaagttcgtgtgcctgaactgcggcttcgagacacacgccgatgaacaggctgccctgaacattgccagaagctggctgttcctgagaagccaagagtacaagaagtaccagaccaacaagaccaccggcaacaccgacaagagggcctttgtggaaacctggcagagcttctacagaaaaaagctgaaagaagtctggaagcccgccgtg

SEQ ID NO: 43952 - DNA, 2937 bp, Artificial Sequence
  CasX Variant
caagagatcaagagaatcaacaagatcagaaggagactggtcaaggacagcaacacaaagaaggccggcaagacacggggccccatgaaaaccctgctcgtcagagtgatgacccctgacctgagagagcggctggaaaacctgagaaagaagcccgagaacatccctcagcctatcagcaacaccagcagggccaacctgaacaagctgctgaccgactacaccgagatgaagaaagccatcctgcacgtgtactgggaagagttccagaaagaccccgtgggcctgatgagcagagttgctcagcctgccagcaagaagatcgaccagaacaagctgaagcccgagatggacgagaagggcaatctgaccacagccggctttgcctgctctcagtgtggccagcctctgttcgtgtacaagctggaacaggtgtccgagaaaggcaaggcctacaccaactacttcggcagatgtaacgtggccgagcacgagaagctgattaagctggcccagctgaaacctgagaaggactctgatgaggccgtgacctacagcctgggcaagtttggacagagagccctggacttctacagcatccacgtgaccaaagaaagcacacaccccgtgaagcccctggctcagatcgccggcaatagatacgcctcttcccctgtgggcaaagccctgtccgatgcctgcatgggaacaatcgccagcttcctgagcaagtaccaggacatcatcatcgagcaccagaaggtggtcaagggcaaccagaagagactggaaagcctgagggagctggccggcaaagagaacctggaataccccagcgtgaccctgcctcctcagcctcacacaaaagaaggcgtggacgcctacaacgaagtgatcgccagagtgagaatgtgggtcaacctgaacctgtggcagaagctgaaactgtccagggacgacgccaagcctctgctgagactgaagggcttccctagcttccctctggtggaaagacaggccaatgaagtggattggtgggacatggtctgcaacgtgaagaagctgatcaacgagaagaaagaggatggcaaggttttctggcagaacctggccggctacaagagacaagaagccctgaggccttacctgagcagcgaagaggaccggaagaagggcaagaagttcgccagataccagctgggcgacctgctgctgcacctggaaaagaagcacggcgaggactggggcaaagtgtacgatgaggcctgggagagaatcgacaagaaggtggaaggcctgagcaagcacattaagctggaagaggaaagaaggagcgaggacgcccaatctaaagccgctctgaccgattggctgagagccaaggccagctttgtgatcgagggcctgaaagaggccgacaaggacgagttctgcagatgcgagctgaagctgcagaagtggtacggcgatctgagaggcaagcccttcgccattgaggccgagaacagcatcctggacatcagcggcttcagcaagcagtacaactgcgccttcatttggcagaaagacggcgtcaagaaactgaacctgtacctgatcatcaattacttcaaaggcggcaagctgcggttcaagaagatcaaacccgaggccttcgaggctaacagattctacaccgtgatcaacaaaaagtccggcgagatcgtgcccatggaagtgaacttcaacttcgacgaccccaacctgattatcctgcctctggccttcggcaagagacagggcagagagttcatctggaacgatctgctgagcctggaaaccggctctctgaagctggccaatggcagagtgatcgagaaaaccctgtacaacaggagaaccagacaggacgagcctgctctgtttgtggccctgaccttcgagagaagagaggtgctggacagcagcaacatcaagcccatgaacctgatcggcgtggaccggggcgagaatatccctgctgtgatcgccctgacagaccctgaaggatgcccactgagcagattcaaggactccctgggcaaccctacacacatcctgagaatcggcgagagctacaaagagaagcagaggacaatccaggccaagaaagaggtggaacagagaagagccggcggatactctaggaagtacgccagcaaggccaagaatctggccgacgacatggtccgaaacaccgccagagatctgctgtactacgccgtgacacaggacgccatgctgatcttcgagaatctgagcagaggcttcggccggcagggcaagagaacctttatggccgagaggcagtacaccagaatggaagattggctcacagctaaactggcctacgagggactgcccagcaagacctacctgtccaaaacactggcccagtatacctccaagacctgcagcaattgcggcttcaccatcaccagcgccgactacgacagagtgctggaaaagctcaagaaaaccgccaccggctggatgaccaccatcaacggcaaagagctgaaggttgagggccagatcacctactacaacaggtacaagaggcagaacgtcgtgaaggatctgagcgtggaactggacagactgagcgaagagagcgtgaacaacgacatcagcagctggacaaagggcagatcaggcgaggctctgagcctgctgaagaagaggtttagccacagacctgtgcaagagaagttcgtgtgcctgaactgcggcttcgagacacacgccgatgaacaggctgccctgaacattgccagaagctggctgttcctgagaagccaagagtacaagaagtaccagaccaacaagaccaccggcaacaccgacaagagggcctttgtggaaacctggcagagcttctacagaaaaaagctgaaagaagtctggaagcccgccgtg

SEQ ID NO: 43953 - DNA, 2937 bp, Artificial Sequence
  CasX Variant
caagagatcaagagaatcaacaagatcagaaggagactggtcaaggacagcaacacaaagaaggccggcaagacacggggccccatgaaaaccctgctcgtcagagtgatgacccctgacctgagagagcggctggaaaacctgagaaagaagcccgagaacatccctcagcctatcagcaacaccagcagggccaacctgaacaagctgctgaccgactacaccgagatgaagaaagccatcctgcacgtgtactgggaagagttccagaaagaccccgtgggcctgatgagcagagttgctcagcctgccagcaagaagatcgaccagaacaagctgaagcccgagatggacgagaagggcaatctgaccacagccggctttgcctgctctcagtgtggccagcctctgttcgtgtacaagctggaacaggtgtccgagaaaggcaaggcctacaccaactacttcggcagatgtaacgtggccgagcacgagaagctgattaagctggcccagctgaaacctgagaaggactctgatgaggccgtgacctacagcctgggcaagtttggacagagagccctggacttctacagcatccacgtgaccaaagaaagcacacaccccgtgaagcccctggctcagatcgccggcaatagatacgcctcttcccctgtgggcaaagccctgtccggcgcctgcatgggaacaatcgccagcttcctgagcaagtaccaggacatcatcatcgagcaccagaaggtggtcaagggcaaccagaagagactggaaagcctgagggagctggccggcaaagagaacctggaataccccagcgtgaccctgcctcctcagcctcacacaaaagaaggcgtggacgcctacaacgaagtgatcgccagagtgagaatgtgggtcaacctgaacctgtggcagaagctgaaactgtccagggacgacgccaagcctctgctgagactgaagggcttccctagcttccctctggtggaaagacaggccaatgaagtggattggtgggacatggtctgcaacgtgaagaagctgatcaacgagaagaaagaggatggcaaggttttctggcagaacctggccggctacaagagacaagaagccctgaggccttacctgagcagcgaagaggaccggaagaagggcaagaagttcgccagataccagctgggcgacctgctgctgcacctggaaaagaagcacggcgaggactggggcaaagtgtacgatgaggcctgggagagaatcgacaagaaggtggaaggcctgagcaagcacattaagctggaagaggaaagaaggagcgaggacgcccaatctaaagccgctctgaccgattggctgagagccaaggccagctttgtgatcgagggcctgaaagaggccgacaaggacgagttctgcagatgcgagctgaagctgcagaagtggtacggcgatctgagaggcaagcccttcgccattgaggccgagaacagcatcctggacatcagcggcttcagcaagcagtacaactgcgccttcatttggcagaaagacggcgtcaagaaactgaacctgtacctgatcatcaattacttcaaaggcggcaagctgcggttcaagaagatcaaacccgaggccttcgaggctaacagattctacaccgtgatcaacaaaaagtccggcgagatcgtgcccatggaagtgaacttcaacttcgacgaccccaacctgattatcctgcctctggccttcggcaagagacagggcagagagttcatctggaacgatctgctgagcctggaaaccggctctctgaagctggccaatggcagagtgatcgagaaaaccctgtacaacaggagaaccagacaggacgagcctgctctgtttgtggccctgaccttcgagagaagagaggtgctggacagcagcaacatcaagcccatgaacctgatcggcgtggaccggggcgagaatatccctgctgtgatcgccctgacagaccctgaaggatgcccactgagcagattcaaggactccctgggcaaccctacacacatcctgagaatcggcgagagctacaaagagaagcagaggacaatccaggccaagaaagaggtggaacagagaagagccggcggatactctaggaagtacgccagcaaggccaagaatctggccgacgacatggtccgaaacaccgccagagatctgctgtactacgccgtgacacaggacgccatgctgatcttcgagaatctgagcagaggcttcggccggcagggcaagagaacctttatggccgagaggcagtacaccagaatggaagattggctcacagctaaactggcctacgagggactgcccagcaagacctacctgtccaaaacactggcccagtatacctccaagacctgcagcaattgcggcttcaccatcaccagcgccgactacgacagagtgctggaaaagctcaagaaaaccgccaccggctggatgaccaccatcaacggcaaagagctgaaggttgagggccagatcacctactacaacaggtacaagaggcagaacgtcgtgaaggatctgagcgtggaactggacagactgagcgaagagagcgtgaacaacgacatcagcagctggacaaagggcagatcaggcgaggctctgagcctgctgaagaagaggtttagccacagacctgtgcaagagaagttcgtgtgcctgaactgcggcttcgagacacacgccgatgaacaggctgccctgaacattgccagaagctggctgttcctgagaagccaagagtacaagaagtaccagaccaacaagaccaccggcaacaccgacaagagggcctttgtggaaacctggcagagcttctacagaaaaaagctgaaagaagtctggaagcccgccgtg

SEQ ID NO: 43954-43956 - skipped (3 entries)

SEQ ID NO: 43957 - RNA, 99 nt, Artificial Sequence; identical to SEQ ID NO: 43577
  gRNA sequence

SEQ ID NO: 43958 - DNA, 60 bp, Artificial Sequence; identical to SEQ ID NO: 365
  7.37 TTC PAM TS

SEQ ID NO: 43959 - DNA, 60 bp, Artificial Sequence; identical to SEQ ID NO: 364
  7.37 TTC PAM NTS

SEQ ID NO: 43960 - DNA, 60 bp, Artificial Sequence
  7.37 CTC PAM TS
agcgcgagcacagctaaggccacggagcgagacatctcggcccgagtgctgtcagcttca

SEQ ID NO: 43961 - DNA, 60 bp, Artificial Sequence
  7.37 CTC PAM NTS
tgaagctgacagcactcgggccgagatgtctcgctccgtggccttagctgtgctcgcgct

SEQ ID NO: 43962 - DNA, 60 bp, Artificial Sequence
  7.37 GTC PAM TS
agcgcgagcacagctaaggccacggagcgagacatctcggcccgactgctgtcagcttca

SEQ ID NO: 43963 - DNA, 60 bp, Artificial Sequence
  7.37 GTC PAM NTS
tgaagctgacagcagtcgggccgagatgtctcgctccgtggccttagctgtgctcgcgct

SEQ ID NO: 43964 - DNA, 60 bp, Artificial Sequence
  7.37 ATC PAM TS
agcgcgagcacagctaaggccacggagcgagacatctcggcccgattgctgtcagcttca

SEQ ID NO: 43965 - DNA, 60 bp, Artificial Sequence
  7.37 ATC PAM NTS
tgaagctgacagcaatcgggccgagatgtctcgctccgtggccttagctgtgctcgcgct

SEQ ID NO: 43966 - DNA, 60 bp, Artificial Sequence
  7.37 TTT PAM TS
agcgcgagcacagctaaggccacggagcgagacatctcggcccaaatgctgtcagcttca

SEQ ID NO: 43967 - DNA, 60 bp, Artificial Sequence
  7.37 TTT PAM NTS
tgaagctgacagcatttgggccgagatgtctcgctccgtggccttagctgtgctcgcgct

SEQ ID NO: 43968 - DNA, 60 bp, Artificial Sequence
  7.37 CTT PAM TS
agcgcgagcacagctaaggccacggagcgagacatctcggccctagtgctgtcagcttca

SEQ ID NO: 43969 - DNA, 60 bp, Artificial Sequence
  7.37 CTT PAM NTS
tgaagctgacagcacttgggccgagatgtctcgctccgtggccttagctgtgctcgcgct

SEQ ID NO: 43970 - DNA, 60 bp, Artificial Sequence
  7.37 GTT PAM TS
agcgcgagcacagctaaggccacggagcgagacatctcggccctactgctgtcagcttca

SEQ ID NO: 43971 - DNA, 60 bp, Artificial Sequence
  7.37 GTT PAM NTS
tgaagctgacagcagttgggccgagatgtctcgctccgtggccttagctgtgctcgcgct

SEQ ID NO: 43972 - DNA, 60 bp, Artificial Sequence
  7.37 ATT PAM TS
agcgcgagcacagctaaggccacggagcgagacatctcggccctattgctgtcagcttca

SEQ ID NO: 43973 - DNA, 60 bp, Artificial Sequence
  7.37 ATT PAM NTS
tgaagctgacagcaattgggccgagatgtctcgctccgtggccttagctgtgctcgcgct

SEQ ID NO: 43974 - DNA, 18 bp, Artificial Sequence
  spacer sequence
ggccgagatgtctcgctc

SEQ ID NO: 43975 - DNA, 19 bp, Artificial Sequence
  spacer sequence
ggccgagatgtctcgctcc

SEQ ID NO: 43976 - DNA, 34 bp, Artificial Sequence
  spacer primer
gagcgagacatctcggccctttgatgctccctcc

SEQ ID NO: 43977 - DNA, 35 bp, Artificial Sequence
  spacer primer
ggagcgagacatctcggccctttgatgctccctcc

SEQ ID NO: 43978 - DNA, 20 bp, Artificial Sequence
  spacer 12.7
ctgcattctagttgtggttt

SEQ ID NO: 43979 - DNA, 20 bp, Artificial Sequence
  spacer 11.30
aaggggctccgcaccacgcc

SEQ ID NO: 43980 - DNA, 20 bp, Artificial Sequence
  spacer 11.31
aagtggctccgcaccacgcc

SEQ ID NO: 43981 - DNA, 20 bp, Artificial Sequence
  spacer 11.1
aaggggctgcgtaccacacc

SEQ ID NO: 43982 - DNA, 18 bp, Artificial Sequence
  spacer NT
gggtcttcgagaagaccc

SEQ ID NO: 43983 - DNA, 89 bp, Artificial Sequence
  guide sequence
actggcgcttttatctgattactttgagagccatcaccagcgactatgtcgtagtgggtaaagctccctcttcggagggagcatcaaag

SEQ ID NO: 43984 - DNA, 97 bp, Artificial Sequence
  guide sequence
actggcacttttatctgattactttgagagccatcaccagcgactatgtcgtatgggtaaagcgcttacggacttcggtccgtaagaagcatcaaag

SEQ ID NO: 43985 - DNA, 96 bp, Artificial Sequence
  guide sequence
actggcacttctatctgattactctgagagccatcaccagcgactatgtcgtatgggtaaagcgcttacggacttcggtccgtaagaagcatcaga

SEQ ID NO: 43986 - DNA, 98 bp, Artificial Sequence
  guide sequence
actggcgcttctatctgattactctgagagccatcaccagcgactatgtcgtatgggtaaagccgcttacggacttcggtccgtaagaggcatcagag

SEQ ID NO: 43987 - DNA, 98 bp, Artificial Sequence
  guide sequence
actggcacttctatctgattactctgagcgccatcaccagcgactatgtcgtatgggtaaagccgcttacggacttcggtccgtaagaggcatcagag

SEQ ID NO: 43988 - DNA, 98 bp, Artificial Sequence
  guide sequence
actggcgcttctatctgattactctgagcgccatcaccagcgactatgtcgtatgggtaaagccgcttacggacttcggtccgtaagaggcatcagag

SEQ ID NO: 43989 - DNA, 98 bp, Artificial Sequence
  guide sequence
actggcgcttctatctgattactctgagcgccatcaccagcgactatgtcgtatgggtaaagcgccttacggacttcggtccgtaaggagcatcagag

SEQ ID NO: 43990 - DNA, 99 bp, Artificial Sequence
  guide sequence
actggcgcttctatctgattactctgagcgccatcaccagcgactatgtcgtagtgggtaaagccgcttacggacttcggtccgtaagaggcatcagag

SEQ ID NO: 43991 - DNA, 98 bp, Artificial Sequence
  guide sequence
acgggactttctatctgattactctgaagtccctcaccagcgactatgtcgtatgggtaaagccgcttacggacttcggtccgtaagaggcatcagag

SEQ ID NO: 43992 - DNA, 98 bp, Artificial Sequence
  guide sequence
acctgtagttctatctgattactctgactacagtcaccagcgactatgtcgtatgggtaaagccgcttacggacttcggtccgtaagaggcatcagag

SEQ ID NO: 43993 - DNA, 109 bp, Artificial Sequence
  Guide and Spacer Sequence
actggcgcttttatctgattactttgagagccatcaccagcgactatgtcgtagtgggtaaagctccctcttcggagggagcatcaaagctgcattctagttgtggttt

SEQ ID NO: 43994 - DNA, 117 bp, Artificial Sequence
  Guide and Spacer Sequence
actggcacttttatctgattactttgagagccatcaccagcgactatgtcgtatgggtaaagcgcttacggacttcggtccgtaagaagcatcaaagctgcattctagttgtggttt

SEQ ID NO: 43995 - DNA, 117 bp, Artificial Sequence
  Guide and Spacer Sequence
actggcacttctatctgattactctgagagccatcaccagcgactatgtcgtatgggtaaagcgcttacggacttcggtccgtaagaagcatcagagctgcattctagttgtggttt

SEQ ID NO: 43996 - DNA, 118 bp, Artificial Sequence
  Guide and Spacer Sequence
actggcgcttctatctgattactctgagagccatcaccagcgactatgtcgtatgggtaaagccgcttacggacttcggtccgtaagaggcatcagagctgcattctagttgtggttt

SEQ ID NO: 43997 - DNA, 118 bp, Artificial Sequence
  Guide and Spacer Sequence
actggcacttctatctgattactctgagcgccatcaccagcgactatgtcgtatgggtaaagccgcttacggacttcggtccgtaagaggcatcagagctgcattctagttgtggttt

SEQ ID NO: 43998 - DNA, 118 bp, Artificial Sequence
  Guide and Spacer Sequence
actggcgcttctatctgattactctgagcgccatcaccagcgactatgtcgtatgggtaaagccgcttacggacttcggtccgtaagaggcatcagagctgcattctagttgtggttt

SEQ ID NO: 43999 - DNA, 118 bp, Artificial Sequence
  Guide and Spacer Sequence
actggcgcttctatctgattactctgagcgccatcaccagcgactatgtcgtatgggtaaagcgccttacggacttcggtccgtaaggagcatcagagctgcattctagttgtggttt

SEQ ID NO: 44000 - DNA, 118 bp, Artificial Sequence
  Guide and Spacer Sequence
actggcgcttctatctgattactctgagcgccatcaccagcgactatgtcgtagtgggtaaagccgcttacggacttcggtccgtaagaggcatcagagctgcattctagttgtggtt

SEQ ID NO: 44001 - DNA, 117 bp, Artificial Sequence
  Guide and Spacer Sequence
acgggactttctatctgattactctgaagtccctcaccagcgactatgtcgtatgggtaaagccgcttacggacttcggtccgtaagaggcatcagagctgcattctagttgtggtt

SEQ ID NO: 44002 - DNA, 117 bp, Artificial Sequence
  Guide and Spacer Sequence
acctgtagttctatctgattactctgactacagtcaccagcgactatgtcgtatgggtaaagccgcttacggacttcggtccgtaagaggcatcagagctgcattctagttgtggtt

SEQ ID NO: 44003 - DNA, 109 bp, Artificial Sequence
  Guide and Spacer Sequence
actggcgcttttatctgattactttgagagccatcaccagcgactatgtcgtagtgggtaaagctccctcttcggagggagcatcaaagaaggggctccgcaccacgcc

SEQ ID NO: 44004 - DNA, 117 bp, Artificial Sequence
  Guide and Spacer Sequence
actggcacttttatctgattactttgagagccatcaccagcgactatgtcgtatgggtaaagcgcttacggacttcggtccgtaagaagcatcaaagaaggggctccgcaccacgcc

SEQ ID NO: 44005 - DNA, 116 bp, Artificial Sequence
  Guide and Spacer Sequence
actggcacttctatctgattactctgagagccatcaccagcgactatgtcgtatgggtaaagcgcttacggacttcggtccgtaagaagcatcagaaaggggctccgcaccacgcc

SEQ ID NO: 44006 - DNA, 118 bp, Artificial Sequence
  Guide and Spacer Sequence
actggcgcttctatctgattactctgagagccatcaccagcgactatgtcgtatgggtaaagccgcttacggacttcggtccgtaagaggcatcagagaaggggctccgcaccacgcc

SEQ ID NO: 44007 - DNA, 118 bp, Artificial Sequence
  Guide and Spacer Sequence
actggcacttctatctgattactctgagcgccatcaccagcgactatgtcgtatgggtaaagccgcttacggacttcggtccgtaagaggcatcagagaaggggctccgcaccacgcc

SEQ ID NO: 44008 - DNA, 118 bp, Artificial Sequence
  Guide and Spacer Sequence
actggcgcttctatctgattactctgagcgccatcaccagcgactatgtcgtatgggtaaagccgcttacggacttcggtccgtaagaggcatcagagaaggggctccgcaccacgcc

SEQ ID NO: 44009 - DNA, 118 bp, Artificial Sequence
  Guide and Spacer Sequence
actggcgcttctatctgattactctgagcgccatcaccagcgactatgtcgtatgggtaaagcgccttacggacttcggtccgtaaggagcatcagagaaggggctccgcaccacgcc

SEQ ID NO: 44010 - DNA, 119 bp, Artificial Sequence
  Guide and Spacer Sequence
actggcgcttctatctgattactctgagcgccatcaccagcgactatgtcgtagtgggtaaagccgcttacggacttcggtccgtaagaggcatcagagaaggggctccgcaccacgcc

SEQ ID NO: 44011 - DNA, 118 bp, Artificial Sequence
  Guide and Spacer Sequence
acgggactttctatctgattactctgaagtccctcaccagcgactatgtcgtatgggtaaagccgcttacggacttcggtccgtaagaggcatcagagaaggggctccgcaccacgcc

SEQ ID NO: 44012 - DNA, 118 bp, Artificial Sequence
  Guide and Spacer Sequence
acctgtagttctatctgattactctgactacagtcaccagcgactatgtcgtatgggtaaagccgcttacggacttcggtccgtaagaggcatcagagaaggggctccgcaccacgcc

SEQ ID NO: 44013 - DNA, 109 bp, Artificial Sequence
  Guide and Spacer Sequence
actggcgcttttatctgattactttgagagccatcaccagcgactatgtcgtagtgggtaaagctccctcttcggagggagcatcaaagaagtggctccgcaccacgcc

SEQ ID NO: 44014 - DNA, 119 bp, Artificial Sequence
  Guide and Spacer Sequence
actggcgcttctatctgattactctgagcgccatcaccagcgactatgtcgtagtgggtaaagccgcttacggacttcggtccgtaagaggcatcagagaagtggctccgcaccacgcc

SEQ ID NO: 44015 - DNA, 109 bp, Artificial Sequence
  Guide and Spacer Sequence
actggcgcttttatctgattactttgagagccatcaccagcgactatgtcgtagtgggtaaagctccctcttcggagggagcatcaaagaaggggctgcgtaccacacc

SEQ ID NO: 44016 - DNA, 119 bp, Artificial Sequence
  Guide and Spacer Sequence
actggcgcttctatctgattactctgagcgccatcaccagcgactatgtcgtagtgggtaaagccgcttacggacttcggtccgtaagaggcatcagagaaggggctgcgtaccacacc

SEQ ID NO: 44017 - DNA, 117 bp, Artificial Sequence
  Guide and Spacer Sequence
actggcgcttctatctgattactctgagcgccatcaccagcgactatgtcgtagtgggtaaagccgcttacggacttcggtccgtaagaggcatcagaggggtcttcgagaagaccc

SEQ ID NO: 44018 - DNA, 130 bp, Artificial Sequence
  5' ITR
cctgcaggcagctgcgcgctcgctcgctcactgaggccgcccgggcgtcgggcgacctttggtcgcccggcctcagtgagcgagcgagcgcgcagagagggagtggccaactccatcactaggggttcct

SEQ ID NO: 44019 - DNA, 18 bp, Artificial Sequence
  buffer sequence
gcggcctctagactcgag

SEQ ID NO: 44020 - DNA, 688 bp, Artificial Sequence
  GfaABC1D promoter
aacatatcctggtgtggagtaggggacgctgctctgacagaggctcgggggcctgagctggctctgtgagctggggaggaggcagacagccaggccttgtctgcaagcagacctggcagcattgggctggccgccccccagggcctcctcttcatgcccagtgaatgactcaccttggcacagacacaatgttcggggtgggcacagtgcctgcttcccgccgcaccccagcccccctcaaatgccttccgagaagcccattgagcagggggcttgcattgcaccccagcctgacagcctggcatcttgggataaaagcagcacagccccctaggggctgcccttgctgtgtggcgccaccggcggtggagaacaaggctctattcagcctgtgcccaggaaaggggatcaggggatgcccaggcatggacagtgggtggcagggggggagaggagggctgtctgcttcccagaagtccaaggacacaaatgggtgaggggagagctctccccatagctgggctgcggcccaaccccaccccctcaggctatgccagggggtgttgccaggggcacccgggcatcgccagtctagcccactccttcataaagccctcgcatcccaggagcgagcagagccagagcaggttggagaggagacgcatcacctccgctgctcgcggggtct

SEQ ID NO: 44021 - DNA, 6 bp, Artificial Sequence
  buffer sequence
accggt

SEQ ID NO: 44022 - DNA, 6 bp, Artificial Sequence
  Kozak
gccacc

SEQ ID NO: 44023 - DNA, 6 bp, Artificial Sequence
  Start codon
atggcc

SEQ ID NO: 44024 - DNA, 6 bp, Artificial Sequence
  linker
tctaga

SEQ ID NO: 44025 - DNA, 6 bp, Artificial Sequence
  linker
ggatcc

SEQ ID NO: 44026 - DNA, 21 bp, Artificial Sequence
  SV40 NLS
ccaaaaaagaagagaaaggta

SEQ ID NO: 44027 - DNA, 27 bp, Artificial Sequence
  HA tag
tacccatatgatgtccctgactacgct

SEQ ID NO: 44028 - DNA, 9 bp, Artificial Sequence
  linker and stop sequence
ggatcctaa

SEQ ID NO: 44029 - DNA, 30 bp, Artificial Sequence
  buffer sequence
gaattcctagagctcgctgatcagcctcga

SEQ ID NO: 44030 - DNA, 208 bp, Artificial Sequence
  bGH poly(A)
ctgtgccttctagttgccagccatctgttgtttgcccctcccccgtgccttccttgaccctggaaggtgccactcccactgtcctttcctaataaaatgaggaaattgcatcgcattgtctgagtaggtgtcattctattctggggggtggggtggggcaggacagcaagggggaggattgggaagagaatagcaggcatgctgggga

SEQ ID NO: 44031 - DNA, 8 bp, Artificial Sequence
  buffer sequence
ggtaccgt

SEQ ID NO: 44032 - DNA, 241 bp, Artificial Sequence
  U6 promoter
gagggcctatttcccatgattccttcatatttgcatatacgatacaaggctgttagagagataattggaattaatttgactgtaaacacaaagatattagtacaaaatacgtgacgtagaaagtaataatttcttgggtagtttgcagttttaaaattatgttttaaaatggactatcatatgcttaccgtaacttgaaagtatttcgatttcttggctttatatatcttgtggaaaggac

SEQ ID NO: 44033 - DNA, 8 bp, Artificial Sequence
  buffer sequence
gaaacacc

SEQ ID NO: 44034 - DNA, 15 bp, Artificial Sequence
  buffer sequence
ttttttttggctagc

SEQ ID NO: 44035 - DNA, 17 bp, Artificial Sequence
  buffer sequence
ttttttttggcggccgc

SEQ ID NO: 44036 - DNA, 141 bp, Artificial Sequence
  3' ITR
aggaacccctagtgatggagttggccactccctctctgcgcgctcgctcgctcactgaggccgggcgaccaaaggtcgcccgacgcccgggctttgcccgggcggcctcagtgagcgagcgagcgcgcagctgcctgcagg

SEQ ID NO: 44037 - RNA, 20 nt, Artificial Sequence
  spacer 11.30
aaggggcuccgcaccacgcc

SEQ ID NO: 44038 - RNA, 20 nt, Artificial Sequence
  spacer 12.7
cugcauucuaguugugguuu

SEQ ID NO: 44039 - RNA, 20 nt, Artificial Sequence
  spacer 11.1
aaggggcugcguaccacacc

SEQ ID NO: 44040 - DNA, 19 bp, Artificial Sequence
  primer
ggcaccttccagggtcaag

SEQ ID NO: 44041 - DNA, 20 bp, Artificial Sequence
  primer
gccttctagttgccagccat

SEQ ID NO: 44042 - DNA, 21 bp, Artificial Sequence
  probe
tcccccgtgccttccttgacc

SEQ ID NO: 44043 - RNA, 20 nt, Artificial Sequence
  spacer
aggggucuucgagaagaccc

SEQ ID NO: 44044 - protein, 20 aa, Artificial Sequence
  linker
  SITE (5)..(8): grouped amino acid residues may be present or absent
  SITE (9)..(12): grouped amino acid residues may be present or absent
  SITE (13)..(16): grouped amino acid residues may be present or absent
  SITE (17)..(20): grouped amino acid residues may be present or absent
GGGSGGGSGGGSGGGSGGGS

SEQ ID NO: 44045 - RNA, 141 nt, Artificial Sequence
  scaffold variant
acuggcgcuuuuaucugauuacuuugagagccaucaccagcgacuaugucguaguggguaaagcugcacuaugggcgcagcgucaaugacgcugacgguacaggccagacaauuauugucugguauagugcagcaucaaag

SEQ ID NO: 44046 - RNA, 15 nt, Artificial Sequence
  REV binding element
gcugacgguacaggc

SEQ ID NO: 44047 - RNA, 145 nt, Artificial Sequence
  scaffold variant
acuggcgcuuuuaucugauuacuuugagagccaucaccagcgacuaugucguaguggguaaagcugcacuauggggccacaugaggaucacccaugugguguacagcgcagcgucaaugacgcugacgauagugcagcaucaaag
